(19) United States
(12) Patent Application Publication
(10) Pub. No.: US 2025/0340598 A1
(43) Pub. Date: Nov. 6, 2025

(54) COMPOSITIONS COMPRISING V2 OPT HIV ENVELOPES

(71) Applicants: Duke University, Durham, NC (US); Triad National Security, LLC,, Los Alamos, NM (US); The Trustees of The University of Pennsylvania, Philadelphia, PA (US)

(72) Inventors: Barton F. HAYNES, Durham, NC (US); Kevin O. SAUNDERS, Durham, NC (US); Bette T. KORBER, Los Alamos, NM (US); Kshitij G. WAGH, Los Alamos, NM (US); Beatrice HAHN, Philadelphia, PA (US); George M. SHAW, Philadelphia, PA (US); Wenge DING, Philadelphia, PA (US); Ronnie M. Russell, Philadelphia, PA (US); Drew Weissman, Philadelphia, PA (US); Mohamad-Gabriel ALAMEH, Philadelphia, PA (US)

(21) Appl. No.: 18/700,679

(22) PCT Filed: Oct. 12, 2022
(86) PCT No.: PCT/US2022/046491

§ 371 Date: Apr. 11, 2024

Related U.S. Application Data
(60) Provisional application No. 63/254,867, filed on Oct. 12, 2021.
(60) Provisional application No. 63/338,547, filed on May 5, 2022.

(51) Int. Cl. C07K 14/005; A61K 39/00; A61K 39/21; A61P 37/04

(52) U.S. Cl. CPC C07K 14/005; A61K 39/21; A61P 37/04; A61K 2039/53; A61K 2039/55555; C12N 2740/16122; C12N 2740/16134

(57) ABSTRACT

In certain aspects the invention provides HIV-1 immunogens, including HIV-1 envelopes with optimized V2 loop for antibody induction.

[0001] This invention was made with government support under Center for HIV/AIDS Vaccine Immunology-Immunogen Design grant UM1-A1100645 and UM1-A1144371 from the NIH, NIAID, Division of AIDS. The government has certain rights in the invention.

[0002] The United States government has rights in this invention pursuant to Contract No. 89233218CNA000001 between the United States Department of Energy and Triad National Security, LLC for the operation of Los Alamos National Laboratory.

[0003] This application claims the benefit and priority of U.S. Application Ser. Nos. 63/254,867 filed Oct. 12, 2021 and 63/338,547 filed May 5, 2022 the contents each of which are incorporated by reference in its entirety.

### TECHNICAL FIELD

[0004] The present invention relates in general, to a composition suitable for use in inducing anti-HIV-1 antibodies, and, in particular, to immunogenic compositions comprising envelope proteins and nucleic acids to induce cross-reactive neutralizing antibodies and increase their breadth of coverage. The invention also relates to methods of inducing such broadly neutralizing anti-HIV-1 antibodies using such compositions.

### BACKGROUND

[0005] The development of a safe and effective HIV-1 vaccine is one of the highest priorities of the scientific community working on the HIV-1 epidemic. While anti-retroviral treatment (ART) has dramatically prolonged the lives of HIV-1 infected patients, ART is not routinely available in developing countries.

### SUMMARY OF THE INVENTION

[0006] In certain embodiments, the invention provides compositions and method for induction of immune response, for example cross-reactive (broadly) neutralizing Ab (bNAb) induction.

[0007] In certain aspects, the invention provides a CH505, CAP256SU, CAP256wk34.80, CAM13, Q23, or T250 envelope immunogens comprising optimized V2 loop, for example but not limited to initiate VIV2, and/or CD4 binding site and/or Fusion Peptide unmutated common ancestor (UCA) broadly neutralizing antibody (bnAbs) precursors. In certain aspects the invention provides CH505 T/F envelopes comprising optimized V2 loop. In certain aspects the invention provides CAP256SU envelopes comprising optimized V2 loop. In certain aspects the invention provides CAP256wk34.80 envelopes comprising optimized V2 loop. In certain aspects the invention provides CAM13 envelopes comprising optimized V2 loop. In certain aspects the invention provides Q23 envelopes comprising optimized V2 loop. In certain aspects the invention provides T250 envelopes comprising optimized V2 loop.

[0008] In certain embodiments, the compositions contemplate nucleic acid, as DNA and/or RNA, or proteins immunogens either alone or in any combination. In certain embodiments, the methods contemplate genetic, as DNA and/or RNA, immunization either alone or in combination with envelope protein(s).

[0009] In certain embodiments the nucleic acid encoding an envelope is operably linked to a promoter inserted in an expression vector. In certain aspects the compositions comprise a suitable carrier. In certain aspects the compositions comprise a suitable adjuvant.

[0010] In certain embodiments the induced immune response includes induction of antibodies, including but not limited to autologous and/or cross-reactive (broadly) neutralizing antibodies against HIV-1 envelope. Various assays that analyze whether an immunogenic composition induces an immune response, and the type of antibodies induced are known in the art and are also described herein.

[0011] In certain aspects the invention provides a nucleic acid sequence encoding any of the polypeptides of the invention, wherein the nucleic acid is operably linked to a promoter. In certain aspects the invention provides a nucleic acid consisting essentially of a nucleic acid sequence encoding any of the polypeptides of the invention, wherein the nucleic acid is operably linked to a promoter. In certain aspects the invention provides an expression vector comprising any of the nucleic acid sequences of the invention, wherein the nucleic acid is operably linked to a promoter. In certain aspects the invention provides an expression vector comprising a nucleic acid sequence encoding any of the polypeptides of the invention, wherein the nucleic acid is operably linked to a promoter. In certain aspects the invention provides an expression vector consisting essentially a nucleic acid sequence encoding any of the polypeptides of the invention, wherein the nucleic acid is operably linked to a promoter. In certain embodiments, the nucleic acids are codon optimized for expression in a mammalian cell, in vivo or in vitro. In certain aspects the invention provides nucleic acids comprising any one of the nucleic acid sequences of invention. In certain aspects the invention provides nucleic acids consisting essentially of any one of the nucleic acid sequences of invention. In certain aspects the invention provides nucleic acids consisting of any one of the nucleic acid sequences of invention. In certain embodiments the nucleic acid of the invention, is operably linked to a promoter and is inserted in an expression vector. In certain aspects the invention provides an immunogenic composition comprising the expression vector.

[0012] In certain aspects the invention provides a composition comprising at least one of the nucleic acid sequences of the invention. In certain aspects the invention provides a composition comprising any one of the nucleic acid sequences of invention. In certain aspects the invention provides a composition comprising at least one nucleic acid sequence encoding any one of the polypeptides of the invention.

[0013] In certain aspects the invention provides a composition comprising at least one nucleic acid encoding an HIV-1 envelope of the invention.

[0014] In certain embodiments, the compositions and methods employ an HIV-1 envelope as polypeptide instead of a nucleic acid sequence encoding the HIV-1 envelope. In certain embodiments, the compositions and methods employ an HIV-1 envelope as polypeptide, a nucleic acid sequence encoding the HIV-1 envelope, or a combination thereof. In certain embodiments, the polypeptides are recombinantly produced.

[0015] The envelope used in the compositions and methods of the invention can be a gp160, gp150, gp145, gp140, gp120, gp41, or N-terminal deletion variants thereof as described herein, cleavage resistant variants thereof as described herein, or codon optimized sequences thereof. In certain embodiments the composition comprises envelopes as trimers. In certain embodiments, envelope proteins are multimerized, for example trimers are attached to a particle such that multiple copies of the trimer are attached and the multimerized envelope is prepared and formulated for immunization in a human. In certain embodiments, the compositions comprise envelopes, including but not limited to trimers as particulate, high-density array on liposomes or other particles, for example but not limited to nanoparticles. In some embodiments, the trimers are in a well ordered, near native like or closed conformation. In some embodiments the trimer compositions comprise a homogenous mix of native like trimers. In some embodiments the trimer compositions comprise at least 65%, 70%, 75%, 80%, 85%, 90%, 95% native like trimers.

[0016] The polypeptide contemplated by the invention can be a polypeptide comprising any one of the polypeptides described herein. The polypeptide contemplated by the invention can be a polypeptide consisting essentially of any one of the polypeptides described herein. The polypeptide contemplated by the invention can be a polypeptide consisting of any one of the polypeptides described herein. In certain embodiments, the polypeptide is recombinantly produced. In certain embodiments, the polypeptides and nucleic acids of the invention are suitable for use as an immunogen, for example to be administered in a human subject.

[0017] In certain embodiments the envelope is any of the forms of HIV-1 envelope. In certain embodiments the envelope is a gp120, gp140, gp145 (i.e. with a transmembrane), gp150 envelope. In certain embodiments, gp140 is designed to form a stable trimer. In certain embodiments envelope protomers form a trimer which is not a SOSIP timer. In certain embodiment the trimer is a SOSIP based trimer wherein each protomer comprises additional modifications. In certain embodiments, envelope trimers are recombinantly produced. In certain embodiments, envelope trimers are purified from cellular recombinant fractions by antibody binding and reconstituted in lipid comprising formulations. See for example WO2015/127108 titled “Trimeric HIV-1 envelopes and uses thereof” which content is herein incorporated by reference in its entirety. In certain embodiments the envelopes of the invention are engineered and comprise non-naturally occurring modifications.

[0018] In certain embodiments, the envelope is in a liposome. In certain embodiments the envelope comprises a transmembrane domain with a cytoplasmic tail embedded in a liposome. In certain embodiments, the nucleic acid comprises a nucleic acid sequence which encodes a gp120, gp140, gp145, gp150, gp160.

[0019] In certain embodiments, where the nucleic acids are operably linked to a promoter and inserted in a vector, the vectors are any suitable vector. Non-limiting examples include, VSV, replicating rAdenovirus type 4, MVA, Chimp adenovirus vectors, pox vectors, and the like. In certain embodiments, the nucleic acids are administered in NanoTaxi block polymer nanospheres. In certain embodiments, the composition and methods comprise an adjuvant. Non-limiting examples include, AS01 B, AS01 E, gla/5E, alum, Poly I poly C (poly IC), polyIC/long chain (LC) TLR agonists, TLR7/8 and 9 agonists, or a combination of TLR7/8 and TLR9 agonists (see Moody et al. (2014) J. Virol. March 2014 vol. 88 no. 6 3329-3339), or any other adjuvant. Non-limiting examples of TLR7/8 agonist include TLR7/8 ligands, Gardiquimod, Imiquimod and R848 (resiquimod). A non-limiting embodiment of a combination of TLR7/8 and TLR9 agonist comprises R848 and oCpG in STS (see Moody et al. (2014) J. Virol. March 2014 vol. 88 no. 6 3329-3339).

[0020] In non-limiting embodiments, the adjuvant is an LNP. See e.g., without limitation Shirai et al. “Lipid Nanoparticle Acts as a Potential Adjuvant for Influenza Split Vaccine without Inducing Inflammatory Responses” Vaccines 2020, 8, 433; doi: 10.3390/vaccines8030433, published 3 Aug. 2020. In non-limiting embodiments, LNPs used as adjuvants for proteins or mRNA compositions are composed of an ionizable lipid, cholesterol, lipid conjugated with polyethylene glycol, and a helper lipid. Non-limiting embodiment include LNPs without polyethylene glycol.

[0021] In certain aspects the invention provides a cell comprising a nucleic acid encoding any one of the envelopes of the invention suitable for recombinant expression. In certain aspects, the invention provides a clonally derived population of cells encoding any one of the envelopes of the invention suitable for recombinant expression. In certain aspects, the invention provides a stable pool of cells encoding any one of the envelopes of the invention suitable for recombinant expression.

[0022] In certain aspects, the invention provides a recombinant HIV-1 envelope polypeptide listed in Table 1, 2, 3, and/or 4. In certain embodiments, the polypeptide is a non-naturally occurring protomer designed to form an envelope trimer. The invention also provides nucleic acids encoding these recombinant polypeptides. Non-limiting examples of amino acids and nucleic acids of such protomers are shown in FIGS. 3A-5E, 12F, 13, 14, 16, 17, and 18F.

[0023] In certain aspects the invention provides a recombinant trimer comprising three identical protomers of an envelope from Table 1, 2, 3 and/or 4. In certain aspects the invention provides an immunogenic composition comprising the recombinant trimer and a carrier, wherein the trimer comprises three identical protomers of an HIV-1 envelope listed in Table 1, 2, 3 and/or 4. In certain aspects the invention provides an immunogenic composition comprising a nucleic acid encoding these recombinant HIV-1 envelope and a carrier.

[0024] In certain aspects the invention provides nucleic acids encoding HIV-1 envelopes for immunization wherein the nucleic acid encodes a gp120 envelope, gp120D8 envelope, a gp140 envelope (gp140C, gp140CF, gp140CFI) as soluble or stabilized protomer of a SOSIP trimer, a gp145 envelope, a gp150 envelope, or a transmembrane bound envelope.

[0025] In certain aspects the invention provides a selection of HIV-1 envelopes for immunization wherein the HIV-1 envelope is a gp120 envelope or a gp120D8 variant. In certain embodiments a composition for immunization comprises protomers that form stabilized SOSIP trimers.

[0026] In certain embodiments, the compositions for use in immunization further comprise an adjuvant.

[0027] In certain embodiments, wherein the compositions comprise a nucleic acid, the nucleic acid is operably linked to a promoter, and could be inserted in an expression vector. In certain embodiments, the nucleic acid is a mRNA. In certain embodiments, the nucleic acid is encapsulated in a lipid nanoparticle.

[0028] In one aspect the invention provides a composition for a prime boost immunization regimen comprising one or more envelopes from Table 1, 2, 3 and/or 4, wherein the polypeptide is a non-naturally occurring protomer designed to form an envelope trimer, wherein the envelope is a prime or boost immunogen. In one aspect the invention provides a composition for a prime boost immunization regimen comprising one or more envelopes of the invention.

[0029] In certain aspects the invention provides methods of inducing an immune response in a subject comprising administering a composition comprising a polypeptide and/or any suitable form of a nucleic acid(s) encoding an HIV-1 envelope(s) in an amount sufficient to induce an immune response.

[0030] In certain embodiments, the nucleic acid encodes a gp120 envelope, gp120D8 envelope, a gp140 envelope (gp140C, gp140CF, gp140CFI) as soluble or stabilized protomer of a SOSIP trimer, a gp145 envelope, a gp150 envelope, or a transmembrane bound envelope. In certain embodiments, the polypeptide is gp120 envelope, gp120D8 envelope, a gp140 envelope (gp140C, gp140CF, gp140CFI) as soluble or stabilized protomer of a SOSIP trimer, a gp145 envelope, a gp150 envelope, or a transmembrane bound envelope.

[0031] In certain embodiments, the methods comprise administering an adjuvant. In certain embodiments, the methods comprise administering an agent which modulates host immune tolerance. In certain embodiments, the administered polypeptide is multimerized in a liposome or nanoparticle. In certain embodiments, the methods comprise administering one or more additional HIV-1 immunogens to induce a T cell response. Non-limiting examples include gag, nef, pol, etc.

[0032] In certain aspects, the invention provides a recombinant HIV-1 Env ectodomain trimer, comprising three gpl20-gp41 protomers comprising a gpl20 polypeptide and a gp41 ectodomain, wherein each protomer is the same and each protomer comprises portions from envelope BG505 HIV-1 strain and gp120 polypeptide portions from a CH505 HIV-1 strain and stabilizing mutations A316W and E64K. In certain embodiments, the trimer is stabilized in a prefusion mature closed conformation, and wherein the trimer does not comprise non-natural disulfide bond between cysteine substitutions at positions 201 and 433 of the HXB2 reference sequence. Non-limited examples of envelopes contemplated as trimers are listed in Table 1. In some embodiments, the amino acid sequence of one monomer comprised in the trimer is shown in FIG. 3-5, 12F, 13, 14, 16, 17, and 18F. In some embodiments, the trimer is immunogenic. In some embodiments the trimer binds to any one of the antibodies PGT145, PGT151, CH103UCA, CH103, VRC01, PGT128, or any combination thereof. In some embodiments the trimer does not bind to antibody 19B and/or 17B.

[0033] In certain aspects, the invention provides a pharmaceutical composition comprising any one of the recombinant trimers of the invention. In certain embodiments the compositions comprising trimers are immunogenic. The percent trimer in such immunogenic compositions could vary. In some embodiments the composition comprises 70%, 71%, 72%, 73%, 74%, 75%, 76%, 77%, 78%, 79%, 80%, 81%, 82%, 83%, 84%, 85%, 86%, 87%, 89%, 90%, 91%, 92%, 93%, 94%, 95%, 96%, 97%, 98%, or 99% stabilized trimer.

[0034] In certain embodiments, the envelope comprises ferritin. In certain embodiments, the inventive designs comprise modifications, including without limitation linkers between the envelope and ferritin designed to optimize ferritin nanoparticle assembly.

[0035] In certain aspects, the invention provides a composition comprising any one of the inventive envelopes or nucleic acid sequences encoding the same. In certain embodiments, the nucleic acid is mRNA. In certain embodiments, the mRNA is comprised in a lipid nano-particle (LNP).

[0036] In certain aspects, the invention provides compositions comprising a nanoparticle which comprises any one of the envelopes of the invention.

[0037] In certain embodiments, the nanoparticle is ferritin self assembling nanoparticle.

[0038] In certain aspects, the invention provides a method of inducing an immune response in a subject comprising administering an immunogenic composition comprising any one of the stabilized envelopes of the invention. In certain embodiments, the composition is administered as a prime and/or a boost. In certain embodiments, the composition comprises nanoparticles. In certain embodiments, methods of the invention further comprise administering an adjuvant.

[0039] In certain aspects, the invention provides a composition comprising a plurality of nanoparticles comprising a plurality of the envelopes/trimers of the invention. In non-limiting embodiments, the envelopes/trimers of the invention are multimeric when comprised in a nanoparticle. The nanoparticle size is suitable for delivery. In non-liming embodiments the nanoparticles are ferritin based nanoparticles.

[0040] In certain aspects, the invention provides nucleic acids comprising sequences encoding polypeptides or proteins of the invention. In certain embodiments, the nucleic acids are DNAs. In certain embodiments, the nucleic acids are mRNAs. In certain aspects, the invention provides expression vectors comprising the nucleic acids of the invention.

[0041] In certain aspects, the invention provides a pharmaceutical composition comprising mRNAs encoding the inventive envelopes. In certain embodiments, these are optionally formulated in lipid nanoparticles (LNPs). In certain embodiments, the mRNAs are modified. Modifications include without limitations modified ribonucleotides, poly-A tail, 5′cap.

[0042] In certain aspects the invention provides nucleic acids encoding the inventive polypeptide or protein designs. In non-limiting embodiments, the nucleic acids are mRNA, modified or unmodified, suitable for use any use, e.g but not limited to use as pharmaceutical compositions. In certain embodiments, the nucleic acids are formulated in lipid, such as but not limited to LNPs.

[0043] In non-limiting embodiments, the invention provides compositions comprising an envelope selected from FIGS. 4C-4D, 7, 8, 9, 10, 11, 12, 13, 14, 16, 17, 18, 19 or any combination thereof. Non-limiting embodiments of combinations include CAP256SU_UCA_OPT_3.0_K170R (also referred to as CAP256SU_OPT_4.0), CAP256SU_UCA_OPT_2.0, CAM13RRK_K130H, CH505_UCA_OPT3_D167N, or any combination thereof. See FIGS. 8-12. Non-limiting embodiments of combinations includes HIV_CAP256SU_OPT_4.0, CAM13RRRK, CAP256wk34.80_V2_UCA_OPT_4.0, CAP256wk34.80 V2UCAOPT_RRK, CAP256wk34.80_V2UCAOPT_R171K, CAP256wk34.80 PCT64UCA_OPT and A.Q23_17CHIM.SOSIPV5.2.8/293F (HV1301552) or any combination thereof (FIGS. 14-16). In non-limiting embodiments, the composition comprises CAP256wk34.80_V2_UCA_OPT_4.0. In non-limiting embodiments, the composition comprises HIV_CAP256SU_OPT4.0, CAP256wk34.80_V2UCAOPT_R17IK, CAM13RRRK, and Q23.17 (natural Env). In non-limiting embodiments, the composition comprises CAP256wk34.80_V2UCAOPT_RRK, CAP256wk34.80_V2UCAOPT_R17IK, CAM13RRRK, and Q23.17 (natural Env). In non-limiting embodiments, the composition comprises HIV_CAP256SU_OPT4.0, CAP256wk34.80_V2UCAOPT_R17IK, CAM13RRK, and Q23.17 (natural Env). In non-limiting embodiments, the composition comprises CAP256wk34.80_V2UCAOPT_RRK, CAP256wk34.80_V2UCAOPT_R17IK, CAM13RRK, and Q23.17 (natural Env). In non-limiting embodiments, the composition comprises CAP256wk34.80_V2UCAOPT_RRK. In non-limiting embodiments, the composition comprises CAM13RRK. In non-limiting embodiments, the invention provides compositions comprising nucleic acids encoding one or more envelope selected from FIGS. 4C-4D, 7, 8, 9, 10, 11, 12, 13, 14, 16, 17, 18, 19, or any combination thereof. Provided are also methods of using these envelopes and/or nucleic acids, and/or compositions comprising administering an amount sufficient to induce immune responses in a subject.

[0044] In certain aspects, the invention provides a recombinant HIV-1 envelope polypeptide according to Table 2, FIGS. 4C-D, FIG. 12F, FIG. 13, or Table 3, FIG. 14, FIG. 15, FIG. 16, FIG. 17, or FIG. 18F, or Table 4 or an envelope polypeptide encoded by a nucleic acid according to FIG. 19. In certain aspects, the invention provides a recombinant HIV-1 envelope polypeptide CAP256SU_UCA_OPT_3.0_K170R (also referred to as CAP256SU_OPT_4.0) or HIV_CAP256.wk34.c80_V2UCA_OPT_4.0 R171K. In certain embodiments, the polypeptide is a non-naturally occurring protomer. In some embodiments, the polypeptide is designed to form an envelope trimer. In certain embodiments, the envelope is based on CH505 T/F envelope and comprises optimized sequence for binding to V2 antibodies, including without limitation V2 UCAs. In certain embodiments the envelope is based on CAP256. In certain embodiments the envelope is based on HIV_CAP256SU (based on the HIV sequence). In certain embodiments the envelope is based on CAP256 SU (based on the SHIV.CAP256SU sequence). SHIV.CAP256SU differs in HXB2 position 375 and has a SIVmac cytoplasmic tail from HXB2 position 721 to the terminus. In certain embodiments the envelope is based on CAP256 SU_375S (the same as CAP256 SU sequence with a serine at HXB2 position 375). As used herein, an envelope based on CAP256 includes envelopes based at least on these three variants of CAP256SU. In certain embodiments, the envelope is based on CAP256wk34.80. In certain embodiments the envelope is based on CAM13. In certain embodiments, the envelope is based on Q23.17. In certain embodiment, the envelope comprises mutations H130D, D167N, K169R, Q170R and Q171K, or a combination thereof. In certain embodiments, the V1 hypervariable loop at wildtype Env HXB2 positions 132-152 is replaced with the sequence STYNNTHNISK. In certain embodiments, the V2 hypervariable loop at wildtype Env HXB2 positions 185-190 is replaced with the sequence NKNGRQ. In certain embodiments the V1 hypervariable loop at wildtype Env HXB2 positions 132-152 is replaced with the sequence STYNNTHNISK and the V2 hypervariable loop at wildtype Env HXB2 positions 185-190 is replaced with the sequence NKNGRQ. In certain embodiments, the envelope comprises glycan knock-in mutations as described in Wagh et al. Cell Reports 25 (4): 893-908 (2018) (pubmed.ncbi.nlm.nih.gov/30355496/), the content of which is hereby incorporated by reference. In certain embodiments the envelope polypeptide is designed to multimerize. In some embodiments the envelope sequence comprises a self-assembling protein. In certain embodiments, the self-assembling protein is a ferritin. In other embodiments, the self assembling protein is added via a sortase A reaction.

[0045] Is some embodiments, the envelope is based on CAM13RRK, CAM13RRRK, HIV_CAP256SU_UCA_OPT_4.0, CAP256SU_UCA_OPT_4.0 375S, CAP256SU_UCA_OPT_4.0_Y375S_D167N, CAP256_wk34.80_V2UCA_OPT, CAP256 wk34.80 PCT64UCA_OPT, CAP256_wk34.80_V2UCA_OPT_R17IK, CAP256 wk34.80 V2UCA_OPT_RRK, CAP256_wk34.80_V2UCA_OPT_RRK_D167N, Q23.17 (natural_wildtype), Q23.17_V2UCAOPT, Q23.17_V2UCAOPT_GLY, Q23.17_V2UCAOPT_ALT, Q23.17_V2UCAOPT_GLY_ALT, Q23.17_V2UCAOPT_GLY_ALT_R170Q, CH505_V2UCAOPT2_N332, CH505_V2UCAOPT_v3.0. See Table 2.

[0046] In certain embodiments, the optimized V2 loop modifications described herein can be incorporated into an envelope from Table 1 or Table 3.

[0047] In some embodiments, the invention provides a nucleic acid of FIG. 19 or 17 or encoding a recombinant HIV-1 envelope polypeptide according to Table 2, FIGS. 4C-D, FIG. 12F, FIG. 13, or Table 3, FIG. 14, FIG. 15, FIG. 16, FIG. 17, or FIG. 18F, or Table 4 or an envelope polypeptide encoded by a nucleic acid according to FIG. 19. In non-limiting embodiments, the nucleic acid is an mRNA. In some embodiments, the mRNA comprises the nucleic acids according to FIG. 19, wherein thymine (T) will be uridine (U). In some embodiments, the mRNA comprises the nucleic acids according to FIG. 19, wherein thymine (T) will be 1-methyl-psuedouridine. In some embodiments, the mRNA is modified. In some embodiments, the modification is a modified nucleotide such as 5-methyl-cytidine and/or 6-methyl-adenosine and/or modified uridine. In some embodiments, the mRNA comprises the nucleic acids according to FIG. 19, wherein the poly A tail is about 85 to about 200 nucleotides long. In some embodiments, the mRNA comprises the nucleic acids according to FIG. 19, wherein the poly A tail is about 85 to about 110 nucleotides long. In some embodiments, the mRNA comprises the nucleic acids according to FIG. 19, wherein the poly A tail is about 90 to about 110 nucleotides long. In some embodiments, the mRNA comprises the nucleic acids according to FIG. 19, wherein thymine (T) will be uridine (U) and wherein the sequence comprises the nucleotides up to the poly A tail, wherein the mRNA comprises a poly A tail about 85 to about 200 nucleotides long. In some embodiments, the mRNA comprises the nucleic acids according to FIG. 19, wherein thymine (T) will be uridine (U) and wherein the sequence comprises the nucleotides up to the poly A tail, wherein the mRNA comprises a poly A tail about 85 to about 110 nucleotides long. In some embodiments, the mRNA comprises the nucleic acids according to FIG. 19, wherein thymine (T) will be uridine (U) and wherein the sequence comprises the nucleotides up to the poly A tail, wherein the mRNA comprises a poly A tail about 90 to about 110 nucleotides long. In some embodiments, the mRNA comprises the nucleic acids according to FIG. 19, wherein thymine (T) will be 1-methyl-psuedouridine and wherein the sequence comprises the nucleotides up to the poly A tail, wherein the mRNA comprises a poly A tail about 85 to about 200 nucleotides long. In some embodiments, the mRNA comprises the nucleic acids according to FIG. 19, wherein thymine (T) will be 1-methyl-psuedouridine and wherein the sequence comprises the nucleotides up to the poly A tail, wherein the mRNA comprises a poly A tail about 85 to about 110 nucleotides long. In some embodiments, the mRNA comprises the nucleic acids according to FIG. 19, wherein thymine (T) will be 1-methyl-psuedouridine and wherein the sequence comprises the nucleotides up to the poly A tail, wherein the mRNA comprises a poly A tail about 90 to about 110 nucleotides long. In non-limiting embodiments, the mRNA is administered as an LNP.

[0048] In some aspects, the invention provides a recombinant trimer comprising three identical protomers of an envelope from Table 2, FIGS. 4C-D, FIG. 12F, FIG. 13, or Table 3, FIG. 14, FIG. 15, FIG. 16, FIG. 17, or FIG. 18F, or Table 4 or encoded by a nucleic acid according to FIG. 19. In some embodiments, the invention provides an immunogenic composition comprising the recombinant trimer and a carrier, wherein the trimer comprises three identical protomers of an HIV-1 envelope listed in Table 2, FIG. 4C, FIG. 12F, FIG. 13, or Table 3, FIG. 14, FIG. 15, FIG. 16, FIG. 17, or FIG. 18F, or Table 4 or encoded by a nucleic acid according to FIG. 19.

[0049] In some embodiments, the invention provides an immunogenic composition comprising a nucleic acid encoding the recombinant HIV-1 envelope and a carrier. In some embodiments, the compositions comprise at least two different immunogens targeting different V2 UCAs. In non-limiting embodiments, the immunogens are from Table 1, Table 2 Table 3 and/or Table 4. Non-limiting embodiment of a combination includes CAP256SU_UCA_OPT_3.0_K170R (also referred to as CAP256SU_OPT_4.0), CAP256SU_UCA_OPT_2.0, CAM13RRK_K130H, CH505_UCA_OPT3_D167N, or any combination thereof. See FIGS. 8-12. Non-limiting embodiment of a combination includes CAP256SU_OPT_4.0, CAM13RRK, CAP256wk34.80_V2_UCA_OPT, CAP256wk34.80_PCT64UCA_OPT or any combination thereof (FIGS. 14-16). In non-limiting embodiments, the composition comprises CAP256wk34.80_V2 UCA_OPT_4.0. In non-limiting embodiments, the composition comprises HIV_CAP256SU_OPT4.0, CAP256wk34.80_V2UCAOPT_R17IK, CAM13RRRK, and Q23.17 (natural Env). In non-limiting embodiments, the composition comprises CAP256wk34.80_V2UCAOPT_RRK, CAP256wk34.80_V2UCAOPT_R17IK, CAM13RRRK, and Q23.17 (natural Env). In non-limiting embodiments, the composition comprises HIV_CAP256SU_OPT4.0, CAP256wk34.80_V2UCAOPT_R17IK, CAM13RRK, and Q23.17 (natural Env). In non-limiting embodiments, the composition comprises CAP256wk34.80_V2UCAOPT_RRK, CAP256wk34.80_V2UCAOPT_R17IK, CAM13RRK, and Q23.17 (natural Env). In non-limiting embodiments, the composition comprises CAP256wk34.80_V2UCAOPT_RRK. In non-limiting embodiments, the composition comprises CAM13RRK.

[0050] In some embodiments, the envelopes are or are designed as trimers, and/or nanoparticles.

[0051] In some embodiments the immunogenic composition further comprises an adjuvant.

[0052] In some embodiments, the nucleic acid encoding one or more envelope selected from FIGS. 4C-4D, 7, 8, 9, 10, 11, 12, 13, 14, 16, 17, 18F, or 19 or any combination thereof is operably linked to a promoter. In some embodiments, the nucleic acid is inserted in an expression vector.

[0053] In some aspects, the invention provides a method of inducing an immune response in a subject comprising administering a composition comprising any suitable form of a nucleic acid(s) encoding one or more envelope selected from FIGS. 4C-4D, 7, 8, 9, 10, 11, 12, 13, 14, 16, 17, 18F, or 19 or any combination thereof or an envelope selected from FIGS. 4C-4D, 7, 8, 9, 10, 11, 12, 13, 14, 16, 17, or 18F, or any combination thereof in an amount sufficient to induce an immune response.

[0054] In some embodiments, the composition administered comprises a nucleic acid encoding a gp120 envelope, gp120D8 envelope, a gp140 envelope (gp140C, gp140CF, gp140CFI) as soluble or stabilized protomer of a SOSIP trimer, a gp145 envelope, a gp150 envelope, a transmembrane bound envelope, a gp160 envelope or an envelope designed to multimerize.

[0055] In some embodiments, the composition administered comprises a polypeptide, wherein the polypeptide is gp120 envelope, gp120D8 envelope, a gp140 envelope (gp140C, gp140CF, gp140CFI) as soluble or stabilized protomer of a SOSIP trimer, a gp145 envelope, a gp150 envelope, a transmembrane bound envelope, or an envelope designed to multimerize.

[0056] In some embodiments, the composition administered further comprises an adjuvant.

[0057] In some embodiments, the method further comprises administering an agent which modulates host immune tolerance. In some embodiment, the polypeptide administered is multimerized in a liposome or nanoparticle.

[0058] In some embodiments, the method further comprising administering one or more additional HIV-1 immunogens to induce a T cell response.

[0059] In some aspects, the invention provides a composition comprises a nanoparticle and a carrier, wherein the nanoparticle comprises an envelope, wherein the envelope is selected from FIGS. 4C-4D, 7, 8, 9, 10, 11, 12, 13, 14, 16, 17, 18F, or 19, or any combination thereof. In some embodiments, the compositions comprises two, three, four or more different immunogens. In some embodiments the immunogens target different V2 UCAs. In non-limiting embodiments the different immunogens are selected from the various V2 OPT designs described herein.

[0060] In some embodiments, the nanoparticle of the composition is ferritin self-assembling nanoparticle.

[0061] In some aspects, the invention provides a composition comprising a nanoparticle and a carrier, wherein the nanoparticle comprises (a) a nucleic acid according to FIG. 17 or 19 or encoding the recombinant HIV-1 envelope polypeptide from Table 2, FIGS. 4C-D, FIG. 12F, FIG. 13, or Table 3, FIG. 14, FIG. 15, FIG. 16, FIG. 17, or FIG. 18F, or Table 4 or (b) a recombinant trimer comprising three identical protomers of an envelope from Table 2, FIG. 4C, FIG. 12F, FIG. 13, or Table 3, FIG. 14, FIG. 15, FIG. 16, FIG. 17, or FIG. 18F, or Table 4 or encoded by a nucleic acid according to FIG. 19.

[0062] In some embodiments, the nanoparticle of the composition is a ferritin self-assembling nanoparticle.

[0063] In some embodiments, the nanoparticle of the composition comprises multimers of trimers.

[0064] In some embodiments, the nanoparticle of the composition comprises 1-8 trimers.

[0065] In some aspects, the invention provides a method of inducing an immune response in a subject comprising administering an immunogenic composition comprising any one of the recombinant envelopes or compositions described herein. In some embodiments the methods comprise administering two, three, four or more different immunogens. In some embodiments, the different immunogens target different V2 UCAs. In non-limiting embodiments the different immunogens are selected from the V2 OPT designs described herein-Tables 1, 2, 3, and/or 4, FIGS. 4C-4D, 7, 8, 9, 10, 11, 12, 13, 14, 16, 17, or 18F.

[0066] In some embodiments, the composition is administered as a prime.

[0067] In some embodiments, the composition is administered as a boost.

[0068] In some aspects, the invention provides a nucleic acid encoding any of the recombinant envelopes described herein. In some embodiments, the invention provides a composition comprising the nucleic acid and a carrier. In some embodiments, the nucleic acid is an mRNA. In some embodiments, the mRNA is encapsulated in a lipid nanoparticle (LNP).

[0069] In some embodiments, the invention provides a method of inducing an immune response in a subject comprising administering an immunogenic composition comprising the nucleic acid encoding any of the recombinant envelopes described herein. In some embodiments, the immunogenic composition further comprises a carrier.

[0070] In certain aspects, the invention provides an immunogenic composition or composition, wherein the composition comprises at least two different HIV-1 envelope polypeptides or nucleic acids encoding a recombinant HIV-1 envelope polypeptide, or a combination thereof.

[0071] In certain aspects, the invention provides an immunogenic composition comprising a first immunogen and a second immunogen, wherein the first immunogen is a recombinant HIV-1 envelope polypeptide from Table 2, FIG. 4C, FIG. 12F, FIG. 13, or Table 3, FIG. 14, FIG. 15, FIG. 16, FIG. 17, or FIG. 18F, or Table 4 or encoded by a nucleic acid according to FIG. 19 or a nucleic acid encoding said recombinant HIV-1 envelope polypeptide, and wherein the second immunogen is a different recombinant HIV-1 envelope polypeptide from Table 2, FIG. 4C, FIG. 12F, FIG. 13, or Table 3, FIG. 14, FIG. 15, FIG. 16, FIG. 17, or FIG. 18F, or Table 4 or encoded by a nucleic acid according to FIG. 19 or a nucleic acid encoding said different recombinant HIV-1 envelope polypeptide. In certain aspects, the invention provides a method of inducing an immune response in a subject comprising administering the immunogenic composition in an amount sufficient to induce an immune response. In certain embodiments, the method further comprising administering an agent which modulates host immune tolerance.

[0072] In certain embodiments, at least one of the first immunogen and the second immunogen is a recombinant HIV-1 envelope polypeptide. In certain embodiments, at least one of the first immunogen and the second immunogen is a recombinant trimer comprising three identical protomers of the recombinant HIV-1 envelope polypeptide. In certain embodiments, the first immunogen and the second immunogen are a recombinant HIV-1 envelope polypeptide. In certain embodiments, at least one of the first immunogen and the second immunogen is a nucleic acid. In certain embodiments, the first immunogen and the second immunogen are a nucleic acid. In certain embodiments, the nucleic acid is an mRNA. In certain embodiments, the mRNA is encapsulated in an LNP. In certain embodiments, the immunogenic composition further comprises one or more additional immunogens, wherein the one or more additional immunogens is different to the first and second immunogens.

[0073] In certain aspects, the invention provides an immunogenic composition comprising HIV-1 envelopes HIV_CAP256SU_OPT4.0, CAP256wk34.80_V2UCAOPT_R17IK, CAM13RRRK, and Q23.17. In certain aspects, the invention provides a method of inducing an immune response in a subject comprising administering the immunogenic composition in an amount sufficient to induce an immune response. In certain embodiments, the method further comprising administering an agent which modulates host immune tolerance.

[0074] In certain embodiments, the HIV-1 envelopes are in the form of a recombinant HIV-1 envelope polypeptides or nucleic acid, or a combination thereof. In certain embodiments, one or more of the HIV-1 envelopes is a recombinant trimer comprising three identical protomers of the recombinant HIV-1 envelope polypeptide. In certain embodiments, the nucleic acid is an mRNA. In certain embodiments, the composition comprises a carrier. In certain embodiments, the composition further comprises an adjuvant.

### BRIEF DESCRIPTION OF THE DRAWINGS

[0075] The patent or application file contains at least one drawing executed in color. To conform to the requirements for PCT patent applications, many of the figures presented herein are black and white representations of images originally created in color.

[0076] FIG. 1 shows CH505 Mature Optimized Design. Shown are CH505 amino acid substitutions that are statistically associated with for V2 apex mature bNAb sensitivity. The letters represent single amino acids, and the height of the letter in the sequence LOGO indicates its frequency in the population. The numbers underneath the LOGO are HXB2 reference strain positions in the viral sequence. O stands for an N embedded in a N-linked glycosylation site. Blue are amino acids that are associated with sensitivity, red are amino acids associated with resistance, black are amino acids that were not associated with either sensitivity or resistance. The V2 SET OPT chimeric SOSIP (last row) carries all the design mutations from the full length CH505 TF V2 SET OPT except at 31, 33 and 588, 644. For the former, the SOSIP construct has the favorable mutations.

[0077] For 588, we suggest mutating to K (quite common aa, signature p-value=0.0005-0.026 depending on the V2 bnab, odd's ratio (OR)=2-5). For 644, we suggest mutating to R (most common sensitive aa, p=0.0006−0.007, OR=2.7−7.9).

[0078] To minimize the number of constructs, we propose adding these to UCA_OPT1 SOSIP constructs (note: our UCA_OPT1 carried all the sensitive signatures for mature bNAbs also in addition to most UCAs/intermediates). Gp41 mutations could also be added in some embodiments.

[0079] FIG. 2 shows additional signature amino acids associated with V2 bNAb unmutated common ancestor or early intermediate antibodies from early stages of V2 apex bNAb maturation. See FIG. 1 for details. UCA_OPT1 SOSIP construct just has one sub-optimal aa at PG9 germline reverted Ab signature sites as compared to the full length UCA_OPT1—it has an M-535 instead of I-535. We suggest using I-535 (fairly common aa, signature p=0.01, OR=3.3). Data not shown for other V2 UCAs/intermediates (CH04, PCT64) but the SOSIP UCA_OPT1 construct carries all the favorable mutations for their signature sites as well. Gp41 mutations could also be added in some embodiments.

[0080] FIGS. 3A-3C show non-limiting embodiments of amino acid sequences. These are continuous sequences where dashes represents gaps if these sequences were aligned.

[0081] FIGS. 4A and 4B show non-limiting embodiments of amino acid and nucleic acid sequences. In FIG. 4B, VDAT=cloning site and Kozak sequence. Underlined=signal peptide that is cleaved from mature protein. FIG. 4C shows a non-limiting embodiment of a gp160 envelope amino acid sequence for CH505.V2UCAOPT.ver2. FIG. 4D shows a non-limiting embodiment of a nucleic acid sequence encoding the envelope in FIG. 4C.

[0082] FIGS. 5A, 5B, 5C and SD show non-limiting embodiment of sortase designs and nucleic acid and protein sequences. FIG. 5E shows non-limiting embodiments of ferritin designs. The linker between the envelope sequence and the ferritin protein sequence could be any suitable linker. The ferritin protein could be any suitable ferritin. See e.g. without limitation U.S. Pat. No. 10,961,283, incorporated herein by reference. The envelopes in these designs are CH505 T/F or CH505 M5. A skilled artisan can readily incorporate the V2 optimization into these envelopes.

[0083] FIG. 6A shows neutralization data for optimized designs of the invention. FIG. 6B summarized the neutralization data of FIG. 6A and shows IC50 ((μg/ml) titers). In FIG. 6B K170R should be Q170R. The neutralization data is from a standard assay in the field: see for e.g. Barbian et al. PMID: 25900654 or Montefiori et al. PMID: 18432938. In this assay Envs being tested are inserted in a standard HIV backbone with a luciferase reporter, the viruses are then expressed in 293T cells and then tested for ability to infect TZM-bl cells in presence of varying concentrations of antibodies measured by luciferase based luminosity. The neutralization results show the drop in infectivity of each pseudotyped Env in the presence of different concentrations of the UCAs. These data show that UCA OPT2 N332 (ver 1) showed reduced infectivity in presence of high concentrations of only 2 UCAs (CH01 and PCT64), while UCA_OPT2 N332 ver2 shows substantially reduced infectivity at high concentrations of CH01, PCT64, PG9 and PG16 UCAs. These results show that version 2 can bind to the 4 V2 apex UCAs, thus suggesting that it could trigger such rare V2 apex precursors when used as an immunogen.

[0084] FIGS. 7A-7I depict the second round design strategy. FIG. 7A depicts the detection of the R170 signature which is a polar contact with Tyr111. FIG. 7B depicts PG16 RUA and PG9 RUA sensitivity for CAM13K (i.e. CAM13+Q171K), CAM13K+K169R, CAM13K +K169R+K170R and CAM13K+K169R+K170Q. FIG. 7C depicts A161 interactions. FIG. 7D depicts the PCT64 LMCA signature determined using CH505 UCA_OPT+H130D was tested to determine. FIGS. 7E-7G depict sensitivity of CH505 TF, CH505 UCA_OPT_2+N332, CH505 UCA_OPT_2+H130D, CH505 UCA_OPT_2+Q170R, or CH505 UCA_OPT_2 +H130D+K169R+Q170R to VRC26 UCA, CHOIRUA3, PG9 RUA, PG16 RUA, PCT64LMCA, and RM5695 UCA. FIG. 7H depicts the sensitivity of candidates to five UCA lineages. FIG. 7I depicts sensitivity of CH50ST; CH505 OPT2 N332; CH505 OPT2 N332 Q170R; or CH505 OPT2 N332 H130D, K169R, Q170R to VRC26 UCA, CH01 RUA3, PG9 RUA, PG16RUA, PCT64 LMCA, or 5695 rhesus UCA.

[0085] FIGS. 8A-8B depict identified V2 apex UCA neutralization constructs. FIG. 8A shows the leading constructs that together as a cocktail are sensitive to all V2 apex UCAs. FIG. 8B depicts other neutralization constructs.

[0086] FIGS. 9A-9S depict initial determination of attractive V2 apex bNAbs targets for immunogen design. FIG. 9A depicts the viral membrane structure. FIG. 9B depicts the V2 apex bNAB from SHIV CH505 infected RM. FIG. 9C shows schematic of signature based approach of immunogen design. See also Bricault et al. Cell Host Microbe 2019 25 (1) 59-72. FIG. 9D depicts phylogenetic and/or contact sites, robustness across bNAbs and datasets, and were used for designing CH505 SET OPT. FIG. 9E depicts neutralization data for 208 global viruses against CH04 & CAP256 UCAs, and heavy and/or light chain germline reverted PG9. FIG. 9F shows analyses for CAP256 IA4. For CAP256 IA4 weak signatures found due to low statistical power (3 out of 208 viruses neutralized). Only resistant signatures outside the epitope. Change to neutral at most sites would involve mutation to rare amino acid and/or removing glycans that could introduce vulnerable gaps in the glycan shield. Only two mutations introduce at 736 & 842. Designed UCA optimized constructs without (UCA OPT1) and with (UCA_OPT2) these weak signatures. FIG. 9G shows Hypervariable Loop Characteristic. Hypervariable loops cannot be aligned due to extreme length & sequence variation. Tested for associations with net charge, length & number of glycans. Found two significant hypervariable loop associations with sensitivity to V2 apex bNAbs: Positively charged V2 loops; V2 apex bNAbs have long anionic CDRH3. Smaller hypervariable V1 & V2 combined: possible steric hindrance due to the dynamic loops. FIG. 9H shows Hypervariable V1 & V2 substitutions: Optimizing for Positive Charge and optimizing for smaller length based on M-group Hypervariable length distribution. FIG. 9I depicts M-group bypervariable length distribution. FIG. 9J depicts mature signature and germline signature sensitivity to neutralization by mature V2 bNAbs. It shows that mature signature introduction increases sensitivity to neutralization by mature V2 bNAbs. Shown are results for CH505 TF and CH505 V2 SET envelopes as gp160 constructs in a pseudovirus neutralization assay. The assay is a standard TZM-BI cell neutralization assay as describer in Sarzotti-Kelsoe et al. J Immunol Methods. 2014 July; 409:131-46. doi: 10.1016/j.jim.2013.11.022. Epub 2013 Dec. 1. Antibody is shown in each panel. It further shows that germline signatures further increase sensitivity to neutralization by mature V2 bNAbs. Shown are results for CH505 TF, CH505 V2 SET, and CH505 UCA_OPT1 envelopes as gp160 constructs in a pseudovirus neutralization assay. Antibody is shown in each panel. The thick arrow shows CH505 UCA OPT1 curve, which in panels A and E overlaps with CH505 V2 SET curve. FIG. 9K shows that UCA signatures increase neutralization sensitivity of CH505 envelopes by unmutated common ancestor (UCA) or reverted common ancestor (RUA) antibodies. Shown are results for CH505 TF, CH505 V2 SET, and CH505 UCA_OPT1 envelopes as gp160 constructs in a pseudovirus neutralization assay. Antibody is shown in each panel. UCA signatures increased the sensitivity of CH505 to neutralization by both CH01 and the PCT64 V2 bNAb UCAs. V2 SET OPT also gains CH01 UCA sensitivity, likely due to H-130. UCA_OPT2 that had CAP256 VRC26 UCA signatures did not confer sensitivity to this UCA. FIG. 9L depicts V2 UCA neutralization. FIG. 9M show sensitivity to neutralization by mature V2 apex bnAbs. Respective antibodies are listed in each panel. N332 represents a predicted V2 apex bNab resistance signature, but is critical for V3 bNabs (CH505 Env has N334). Moving the N334 glycan to N332 did not reduce its sensitivity to mature V2 bNabs, and rendered it highly sensitive to PGT121. The legend listed in FIG. 9M is applicable to all panels in this figure. FIG. 9N shows summary of expression and binding data for various optimized designs expressed as SOSIP designs. Various non-limiting embodiments of SOSIP designs are shown in FIGS. 3 and 4. FIG. 9O shows SET OPT & UCA_OPT constructs expressed as chimeric CH505-BG505 SOSIPs. Different constructs tested with varying quality & expression. Expression of UCA_OPT1 with NxST 332 and gp41 mutations resulted in highest level of trimer formation (88% versus 12% monomer) as shown. It further shows antibody binding consistent with neutralization results. Binding data consistent with neutralization results. FIG. 9P depicts three classes of sites in the CH505 TF considered for mutation to increase sensitivity. FIG. 9Q depicts the mutations present in the CH505 V2 initial design (CH505 TF V2 SET OPT). FIG. 9R depicts the additional mutations present in the CH505 TF UCA_OPT1. FIG. 9S shows a summary of the neutralization data. The table shows that introduction of V2 apex mature signatures in CH505 TF improved sensitivity to mature bNAbs, and gained sensitivity to CH01 UCA-SET OPT column. Introduction of UCA signatures further improved sensitivity to mature bNAbs, to CH01 UCA and gained sensitivity to PCT64 LMCA—UCA OPT column. In this figure the UCA_OPT label shows UCA_OPT2+N332 —the slope of the curve where the curve for CH505 UCA_OPT2+N332 is bending for the PCT64LMCA, whereas it is not for PG9RUA. This indicates that when measured the neutralization up to 250 μg/ml, 50% neutralization could be reached at 105 ug/ml. First column lists the antibody. “WT” refers to CH505 TF sequences without optimization signatures.

[0087] FIGS. 10A-10D depict results of second round of designs. FIG. 10A depicts longitudinal Env evolution data demonstrating escape predominantly at particular amino acid. FIG. 10B depicts D167N association with escape from early (13 month) PCT64 lineage Abs. FIG. 10C depicts M4C054's sensitivity to PCT64-LMCA with glycan deletions at 130 and 133. FIG. 10D depicts CH505.V2UCAOPT.v3.D167N design and neutralization testing.

[0088] FIGS. 11A-11F depict CAM13RRK V2 UCA development. FIG. 11A depicts CAM13 mutated at R-169, R-170 and K-171 (‘CAM13RRK’) is sensitive to CH01, PG9 and PG16 UCAs. FIG. 11B depicts signatures for CAM13RRK. FIG. 11C depicts design construct CAM13RRK delV1 reducing the hypervariable V1 loop length. FIG. 11 D depicts modifications of the natural loops to introduce deletions and positive charges. FIG. 11E depicts CAM13RRK glycan holes. FIG. 11F depicts results from neutralization testing.

[0089] FIGS. 12A-12H depict CAP256SU based Env designs. FIG. 12A depicts month 35 Abs (35B, 35D, 35G, 350 and 35S; no 35M since on a different branch) signature sites. FIG. 12B depicts several other identified signatures. FIG. 12C depicts a sorted list of the 208 global virus panel based on most charge per unit hypervariable V1 or hypervariable V2 length. FIG. 12D depicts the M-group distributions of V1, V2 and V1+V2 length and charge with CAP256SU WT (each in blue, medians in red and constructs in purple). FIG. 12E depicts CAP256SU design including 10 mutations. FIG. 12F depicts sequences of SHIV_CAP256SU, CAP256SU_UCA_OPT, CAP256SU_UCA_OPT_2.0, CAP256SU_UCA_OPT_3.0, and UCA_OPT_3.0_K170R. FIG. 12G depicts neutralization of VR26UCA or VRC26.25, CH01 or CH01 RUA, PG9 or PG9999 RUA, PG16 or PG16 RUA, PCT64 LMCA or PCT64, or Rh-1A or RhA-I neutralization by CAP256SU_V2UCAOPTv3.0K170R_UCA or CAP256SU_V2UCAOPTv3.0K170R_maturebNAb. FIG. 12H depicts CAP256SU constructs and glycan shield filling.

[0090] FIG. 13 shows non-limiting embodiments of amino acid sequences listed in Table 2. These sequences comprise a signal peptide. A skilled artisan understands that any form of a recombinantly expressed protein based on these designs does not include a signal peptide which removed during cell processing.

[0091] FIG. 14 shows non-limiting embodiments of optimized immunogens-sortase designs.

[0092] FIGS. 15A to 15J show rationale and design for a cocktail of V2 apex bNAb germline targeting Envelopes comprising optimized CAP256_wk34.80 based envelopes. FIG. 15A depicts a predicted CAP256UCAOPT_v3 structure. FIG. 15B depicts an improved hypervariable V1 loop. FIG. 15C depicts an improved hypervariable V2 loop. FIG. 15D depicts the glycan holes of CAP256wk34.80. FIG. 15E depicts possible PCT64UCA escape mutations. FIG. 15F depicts the predicted structure of PCT64 UCA interacting with a positively charged region (light chain) of the hypervariable V2 loop. FIG. 15G depicts variation in PCT64 Envs. FIG. 15H depicts a summary of the designs. FIG. 15I depicts neutralization testing experimental data for V2 apex UCA neutralization. FIG. 15J depicts construct designs CAP256SU_UCA_OPT_4.0_D167N and CAP256SU_wk34.80_V2UCA_OPT_R17IK.

[0093] FIG. 16 shows amino acid sequences of non-limiting embodiments of optimized envelopes.

[0094] FIG. 17 shows amino acid sequences and nucleic acid sequences encoding amino acid sequences of non-limiting embodiments of optimized envelopes. HV1303230 to HV1303254 are gp150 and gp160 mRNA constructs designed for HIV_CAP256SU_UCA_OPT_v4.0.

[0095] FIGS. 18A-18F depict examples and sequences for development of improved constructs and mRNAs FIG. 18A depicts the CAM13RRK+K168R (CAM13RRRK) construct reactivity tests. FIG. 18B depicts the CAP256wk34.80_V2_UCA_OPT_R171K reactivity to several UCAs. FIG. 18C depicts HIV-1 CAP256SU with all CAP256SU_UCA_OPT_4.0 backbone mutations introduced reactivity test. FIG. 18D depicts the CAP256_wk34.80_V2UCA_OPT_R17IK construct reactivity tests. FIG. 18E depicts the SOSIP mutations of strategy 1 for HIV_CAP256SU_UCA_OPT_4.0 mRNA designs. FIG. 18F depicts the alignment of sequences for HIV_CAP256SU_UCA_OPT_4.0; mRNAI_CAP256SU_UCA_OPT_4.0; and mRNA2_CAP256SU_UCA_OPT_4.0; is depicted in FIG. 18F. Dots indicate deletions and dashes indicate identities.

[0096] FIG. 19 discloses exemplary mRNA sequences encoding an immunogen.

### DETAILED DESCRIPTION OF THE INVENTION

[0097] The development of a safe, highly efficacious prophylactic HIV-1 vaccine is of paramount importance for the control and prevention of HIV-1 infection. A major goal of HIV-1 vaccine development is the induction of broadly neutralizing antibodies (bnAbs) (Immunol. Rev. 254:225-244, 2013). BnAbs are protective in rhesus macaques against SHIV challenge, but as yet, are not induced by current vaccines.

[0098] For the past 25 years, the HIV vaccine development field has used single or prime boost heterologous Envs as immunogens, but to date has not found a regimen to induce high levels of bnAbs.

[0099] Recently, a new paradigm for design of strategies for induction of broadly neutralizing antibodies was introduced, that of B cell lineage immunogen design (Nature Biotech. 30:423, 2012) in which the induction of bnAb lineages is recreated. It was recently demonstrated the power of mapping the co-evolution of bnAbs and founder virus for elucidating the Env evolution pathways that lead to bnAb induction (Nature 496:469, 2013).

### Sequences/Clones

[0100] Described herein are nucleic and amino acids sequences of HIV-1 envelopes. The sequences for use as immunogens are in any suitable form. In certain embodiments, the described HIV-1 envelope sequences are gp160s. In certain embodiments, the described HIV-1 envelope sequences are gp120s. Other sequences, for example but not limited to stable SOSIP trimer designs, gp145s, gp140s, both cleaved and uncleaved, gp140 Envs with the deletion of the cleavage (C) site, fusion (F) and immunodominant (I) region in gp41—named as gp140ACFI (gp140CFI), gp140 Envs with the deletion of only the cleavage (C) site and fusion (F) domain—named as gp140ACF (gp140CF), gp140 Envs with the deletion of only the cleavage (C)—named gp140AC (gp140C) (See e.g. Liao et al. Virology 2006, 353, 268-282), gp150s, gp41s, which are readily derived from the nucleic acid and amino acid gp160 sequences. In certain embodiments the nucleic acid sequences are codon optimized for optimal expression in a host cell, for example a mammalian cell, a rBCG cell or any other suitable expression system.

[0101] An HIV-1 envelope has various structurally defined fragments/forms: gp160; gp140 —including cleaved gp140 and uncleaved gp140 (gp140C), gp140CF, or gp140CFI; gp120 and gp41. A skilled artisan appreciates that these fragments/forms are defined not necessarily by their crystal structure, but by their design and bounds within the full length of the gp160 envelope. While the specific consecutive amino acid sequences of envelopes from different strains are different, the bounds and design of these forms are well known and characterized in the art.

[0102] For example, it is well known in the art that during its transport to the cell surface, the gp160 polypeptide is processed and proteolytically cleaved to gp120 and gp41 proteins. Cleavages of gp160 to gp120 and gp41 occurs at a conserved cleavage site “REKR.” See Chakrabarti et al. Journal of Virology vol. 76, pp. 5357-5368 (2002) see for example FIG. 1, and Second paragraph in the Introduction on p. 5357; Binley et al. Journal of Virology vol. 76, pp. 2606-2616 (2002) for example at Abstract; Gao et al. Journal of Virology vol. 79, pp. 1154-1163 (2005); Liao et al. Virology vol. 353 (2): 268-282 (2006).

[0103] The role of the furin cleavage site was well understood both in terms of improving cleave efficiency, see Binley et al. supra, and eliminating cleavage, see Bosch and Pawlita, Virology 64 (5): 2337-2344 (1990); Guo et al. Virology 174:217-224 (1990); McCune et al. Cell 53:55-67 (1988); Liao et al. J Virol. Apr; 87 (8): 4185-201 (2013).

[0104] Likewise, the design of gp140 envelope forms is also well known in the art, along with the various specific changes which give rise to the gp140C (uncleaved envelope), gp140CF and gp140CFI forms. Envelope gp140 forms are designed by introducing a stop codon within the gp41 sequence. See Chakrabarti et al. at FIG. 1.

[0105] Envelope gp140C refers to a gp140 HIV-1 envelope design with a functional deletion of the cleavage (C) site, so that the gp140 envelope is not cleaved at the furin cleavage site. The specification describes cleaved and uncleaved forms, and various furin cleavage site modifications that prevent envelope cleavage are known in the art. In some embodiments of the gp140C form, two of the R residues in and near the furin cleavage site are changed to E, e.g., RRVVEREKR is changed to ERVVEREKE, and is one example of an uncleaved gp140 form. Another example is the gp140C form which has the REKR site changed to SEKS. See supra for references.

[0106] Envelope gp140CF refers to a gp140 HIV-1 envelope design with a deletion of the cleavage (C) site and fusion (F) region. Envelope gp140CFI refers to a gp140 HIV-1 envelope design with a deletion of the cleavage (C) site, fusion (F) and immunodominant (I) region in gp41. See Chakrabarti et al. Journal of Virology vol. 76, pp. 5357-5368 (2002) see for example FIG. 1, and Second paragraph in the Introduction on p. 5357; Binley et al. Journal of Virology vol. 76, pp. 2606-2616 (2002) for example at Abstract; Gao et al. Journal of Virology vol. 79, pp. 1154-1163 (2005); Liao et al. Virology vol. 353 (2): 268-282 (2006).

[0107] In certain embodiments, the envelope design in accordance with the present invention involves deletion of residues (e.g., 5-11, 5, 6, 7, 8, 9, 10, or 11 amino acids) at the N-terminus. For delta N-terminal design, amino acid residues ranging from 4 residues or even fewer to 14 residues or even more are deleted. These residues are between the maturation (signal peptide, usually ending with CX, X can be any amino acid) and “VPVXXXX . . . “. In case of CH505 T/F Env as an example, 8 amino acids (italicized and underlined in the below sequence) were deleted: MRVMGIQRNYPQWWIWSMLGFWMLMICNGMWVTVYYGVPVWKEAKTTLFCASDA KAYEKEVHNVWATHACVPTDPNPQE . . . (rest of envelope sequence is indicated as” . . . ”). In other embodiments, the delta N-design described for CH505 T/F envelope can be used to make delta N-designs of other CH505 envelopes. In certain embodiments, the invention relates generally to an immunogen, gp160, gp120 or gp140, without an N-terminal Herpes Simplex gD tag substituted for amino acids of the N-terminus of gp120, with an HIV leader sequence (or other leader sequence), and without the original about 4 to about 25, for example 4, 5, 6, 7, 8, 9, 10, 11, 12, 13, 14, 15, 16, 17, 18, 19, 20, 21, 22, 23, 24, 25 amino acids of the N-terminus of the envelope (e.g. gp120). See U.S. Pat. No. 10,040,826, e.g. at pages 10-12, the contents of which is hereby incorporated by reference in its entirety.

[0108] The general strategy of deletion of N-terminal amino acids of envelopes results in proteins, for example gpl20s, expressed in mammalian cells that are primarily monomeric, as opposed to dimeric, and, therefore, solves the production and scalability problem of commercial gp120 Env vaccine production. In other embodiments, the amino acid deletions at the N-terminus result in increased immunogenicity of the envelopes.

[0109] In certain aspects, the invention provides composition and methods which CH505 Envs, as gp120s, gp140s cleaved and uncleaved, gp145s, gp150s and gp160s, stabilized and/or multimerized trimers, as proteins, DNAs, RNAs, or any combination thereof, administered as primes and boosts to elicit immune response. CH505 Envs as proteins would be co-administered with nucleic acid vectors containing Envs to amplify antibody induction. In certain embodiments, the compositions and methods include any immunogenic HIV-1 sequences to give the best coverage for T cell help and cytotoxic T cell induction. In certain embodiments, the compositions and methods include mosaic and/or consensus HIV-1 genes to give the best coverage for T cell help and cytotoxic T cell induction. In certain embodiments, the compositions and methods include mosaic group M and/or consensus genes to give the best coverage for T cell help and cytotoxic T cell induction. In some embodiments, the mosaic genes are any suitable gene from the HIV-1 genome. In some embodiments, the mosaic genes are Env genes, Gag genes, Pol genes, Nef genes, or any combination thereof. See e.g. U.S. Pat. No. 7,951,377. In some embodiments the mosaic genes are bivalent mosaics. In some embodiments the mosaic genes are trivalent. In some embodiments, the mosaic genes are administered in a suitable vector with each immunization with Env gene inserts in a suitable vector and/or as a protein. In some embodiments, the mosaic genes, for example as bivalent mosaic Gag group M consensus genes, are administered in a suitable vector, for example but not limited to HSV2, would be administered with each immunization with Env gene inserts in a suitable vector, for example but not limited to HSV-2.

### Nucleic Acid Sequences

[0110] In certain aspects the invention provides compositions and methods of Env genetic immunization either alone or with Eny proteins to recreate the swarms of evolved viruses that have led to bnAb induction. Nucleotide-based vaccines offer a flexible vector format to immunize against virtually any protein antigen. Currently, two types of genetic vaccination are available for testing—DNAs and mRNAs.

[0111] In certain aspects the invention contemplates using immunogenic compositions wherein immunogens are delivered as DNA. See Graham B S, Enama M E, Nason M C, Gordon I J, Peel S A, et al. (2013) DNA Vaccine Delivered by a Needle-Free Injection Device Improves Potency of Priming for Antibody and CD8+ T-Cell Responses after rAd5 Boost in a Randomized Clinical Trial. PLoS ONE 8 (4): c59340, page 9. Various technologies for delivery of nucleic acids, as DNA and/or RNA, so as to elicit immune response, both T-cell and humoral responses, are known in the art and are under developments. In certain embodiments, DNA can be delivered as naked DNA. In certain embodiments, DNA is formulated for delivery by a gene gun. In certain embodiments, DNA is administered by electroporation, or by a needle-free injection technologies, for example but not limited to Biojector® device. In certain embodiments, the DNA is inserted in vectors. The DNA is delivered using a suitable vector for expression in mammalian cells. In certain embodiments the nucleic acids encoding the envelopes are optimized for expression. In certain embodiments DNA is optimized, e.g. codon optimized, for expression. In certain embodiments the nucleic acids are optimized for expression in vectors and/or in mammalian cells. In non-limiting embodiments these are bacterially derived vectors, adenovirus based vectors, rAdenovirus (e.g. Barouch DH, et al. Nature Med. 16:319-23, 2010), recombinant mycobacteria (e.g. rBCG or M smegmatis) (Yu, J S et al. Clinical Vaccine Immunol. 14:886-093, 2007; ibid 13:1204-11, 2006), and recombinant vaccinia type of vectors (Santra S. Nature Med. 16:324-8, 2010), for example but not limited to ALVAC, replicating (Kibler K V et al., PLoS One 6: e25674, 2011 Nov. 9.) and non-replicating (Perreau M et al. J. virology 85:9854-62, 2011) NYVAC, modified vaccinia Ankara (MVA)), adeno-associated virus, Venezuelan equine encephalitis (VEE) replicons, Herpes Simplex Virus vectors, and other suitable vectors.

[0112] In certain aspects the invention contemplates using immunogenic compositions wherein immunogens are delivered as DNA or RNA in suitable formulations. Various technologies which contemplate using DNA or RNA or may use complexes of nucleic acid molecules and other entities to be used in immunization. In certain embodiments, DNA or RNA is administered as nanoparticles consisting of low dose antigen-encoding DNA formulated with a block copolymer (amphiphilic block copolymer 704). See Cany et al., Journal of Hepatology 2011 vol. 54 j 115-121; Arnaoty et al., Chapter 17 in Yves Bigot (ed.), Mobile Genetic Elements: Protocols and Genomic Applications, Methods in Molecular Biology, vol. 859, pp293-305 (2012); Arnaoty et al. (2013) Mol Genet Genomics. 2013 August; 288 (7-8): 347-63. Nanocarrier technologies called Nanotaxi® for immunogenic macromolecules (DNA, RNA, Protein) delivery are under development. See for example technologies developed by incellart.

[0113] In certain aspects, the invention provides nucleic acids comprising sequences encoding envelopes of the invention. In certain embodiments, the nucleic acids are DNAs. In certain embodiments, the nucleic acids are mRNAs. In certain aspects, the invention provides expression vectors comprising the nucleic acids of the invention.

[0114] In certain aspects, the invention provides a pharmaceutical composition comprising mRNAs encoding the inventive antibodies. In certain embodiments, these are optionally formulated in lipid nanoparticles (LNPs). In certain embodiments, the mRNAs are modified. Modifications include without limitations modified ribonucleotides, poly-A tail, 5′cap.

[0115] Nucleic acid sequences provided herein, e.g. see FIG. 19, are provided as DNA sequences. However, it should be understood that such sequences also represent RNA sequences, for example, mRNA. For example, RNA polymerase can be used to make RNA sequences from DNA sequences. In RNA sequences, thymine will be uridine. In some embodiments, uridine will be 1-methyl-pseudouridine. In some embodiments, nucleic acids of the invention, including RNA sequences or mRNAs, can further comprise any type of modified nucleotides, including, but not limited to 5-methyl-cytidine, 6-methyl-adenosine, or modified uridine.

[0116] Nucleic acid sequences provided herein, e.g. see FIG. 19, are provided with a poly A tail length of 101 nucleotides. However, it should be understood that mRNA sequences can comprise different lengths of poly A tail. For example, in some embodiments the poly A tail is about 85 to about 200 nucleotides long. For example, in some embodiments the poly A tail is 85 to 200 nucleotides long. In some embodiments the poly A tail is about 85 to about 110 nucleotides long. In some embodiments the poly A tail is 85 to 110 nucleotides long. In some embodiments the poly A tail is about 90 to about 110 nucleotides long. In some embodiments the poly A tail is 90 to 110 nucleotides long.

[0117] In certain aspects the invention provides nucleic acids encoding the inventive envelopes. In non-limiting embodiments, the nucleic acids are mRNA, modified or unmodified, suitable for any use, e.g. but not limited to use as pharmaceutical compositions. In certain embodiments, the nucleic acids are formulated in lipid, such as but not limited to LNPs.

[0118] In some embodiments the antibodies are administered as nucleic acids, including but not limited to mRNAs which could be modified and/or unmodified. See US Pub 20180028645A1, US Pub 20090286852, US Pub 20130111615, US Pub 20130197068, US Pub 20130261172, US Pub 20150038558, US Pub 20160032316, US Pub 20170043037, US Pub 20170327842, U.S. Pat. Nos. 10,006,007, 9,371,511, 9,012,219, US Pub 20180265848, US Pub 20170327842, US Pub 20180344838A1 at least at paragraphs [0260]-[0281], US Pub 20190153425 for non-limiting embodiments of chemical modifications, wherein each content is incorporated by reference in its entirety.

[0119] mRNAs delivered in LNP formulations have advantages over non-LNPs formulations. See US Pub 20180028645A1, US Pub 20190274968, US Pub 20180303925, wherein each content is incorporated by reference in its entirety.

[0120] In certain embodiments the nucleic acid encoding an envelope is operably linked to a promoter inserted an expression vector. In certain aspects the compositions comprise a suitable carrier. In certain aspects the compositions comprise a suitable adjuvant.

[0121] In certain aspects the invention provides an expression vector comprising any of the nucleic acid sequences of the invention, wherein the nucleic acid is operably linked to a promoter. In certain aspects the invention provides an expression vector comprising a nucleic acid sequence encoding any of the polypeptides of the invention, wherein the nucleic acid is operably linked to a promoter. In certain embodiments, the nucleic acids are codon optimized for expression in a mammalian cell, in vivo or in vitro. In certain aspects the invention provides nucleic acids comprising any one of the nucleic acid sequences of invention. In certain aspects the invention provides nucleic acids consisting essentially of any one of the nucleic acid sequences of invention. In certain aspects the invention provides nucleic acids consisting of any one of the nucleic acid sequences of invention. In certain embodiments the nucleic acid of the invention, is operably linked to a promoter and is inserted in an expression vector. In certain aspects the invention provides an immunogenic composition comprising the expression vector.

[0122] In certain aspects the invention provides a composition comprising at least one of the nucleic acid sequences of the invention. In certain aspects the invention provides a composition comprising any one of the nucleic acid sequences of invention. In certain aspects the invention provides a composition comprising at least one nucleic acid sequence encoding any one of the polypeptides of the invention.

[0123] In one embodiment, the nucleic acid is an RNA molecule. In one embodiment, the RNA molecule is transcribed from a DNA sequence described herein. In some embodiments, the RNA molecule is encoded by one of the inventive sequences. In another embodiment, the nucleotide sequence comprises an RNA sequence transcribed by a DNA sequence encoding the polypeptide sequence of the sequences of the invention, or a variant thereof or a fragment thereof. Accordingly, in one embodiment, the invention provides an RNA molecule encoding one or more of inventive antibodies. The RNA may be plus-stranded. Accordingly, in some embodiments, the RNA molecule can be translated by cells without needing any intervening replication steps such as reverse transcription.

[0124] In some embodiments, a RNA molecule of the invention may have a 5′ cap (e.g. but not limited to a 7-methylguanosine, 7mG(5′)ppp(5′)NImpNp, CleanCap® (e.g., the AG, GG, AU, 3′OMe AG, or 3′OMe GG CleanCap®), or ARCA). This cap can enhance in vivo translation of the RNA. The 5′ nucleotide of an RNA molecule useful with the invention may have a 5′ triphosphate group. In a capped RNA this may be linked to a 7-methylguanosine via a 5′-to-5′ bridge. A RNA molecule may have a 3′ poly-A tail. It may also include a poly-A polymerase recognition sequence (e.g. AAUAAA) near its 3′ end. In some embodiments, a RNA molecule useful with the invention may be single-stranded. In some embodiments, a RNA molecule useful with the invention may comprise synthetic RNA.

[0125] The recombinant nucleic acid sequence can be an optimized nucleic acid sequence. Such optimization can increase or alter the immunogenicity of the envelope. Optimization can also improve transcription and/or translation. Optimization can include one or more of the following: low GC content leader sequence to increase transcription; mRNA stability and codon optimization; addition of a Kozak sequence (e.g., GCC ACC) for increased translation; addition of an immunoglobulin (lg) leader sequence encoding a signal peptide; and eliminating to the extent possible cis-acting sequence motifs (i.e., internal TATA boxes).

[0126] Methods for in vitro transfection of mRNA and detection of envelope expression are known in the art.

[0127] Methods for expression and immunogenicity determination of nucleic acid encoded envelopes are known in the art.

[0128] In certain aspects the invention contemplates using immunogenic compositions wherein immunogens are delivered as recombinant proteins. Various methods for production and purification of recombinant proteins, including trimers such as but not limited to SOSIP based trimers, suitable for use in immunization are known in the art. In certain embodiments recombinant proteins are produced in CHO cells.

[0129] The immunogenic envelopes can also be administered as a protein boost in combination with a variety of nucleic acid envelope primes (e.g., HIV-1 Envs delivered as DNA expressed in viral or bacterial vectors)

[0130] Dosing of proteins and nucleic acids can be readily determined by a skilled artisan. A single dose of nucleic acid can range from a few nanograms (ng) to a few micrograms (μg) or milligram of a single immunogenic nucleic acid. Recombinant protein dose can range from a few ug micrograms to a few hundred micrograms, or milligrams of a single immunogenic polypeptide.

[0131] Administration: The compositions can be formulated with appropriate carriers using known techniques to yield compositions suitable for various routes of administration. In certain embodiments the compositions are delivered via intramuscular (IM), via subcutaneous, via intravenous, via nasal, via mucosal routes, or any other suitable route of immunization.

[0132] The compositions can be formulated with appropriate carriers and adjuvants using techniques to yield compositions suitable for immunization. The compositions can include an adjuvant, such as, for example but not limited to, alum, 3M052, poly IC, MF-59 or other squalene-based adjuvant, ASOIB, or other liposomal based adjuvant suitable for protein or nucleic acid immunization. In certain embodiments, the adjuvant is GSK AS01E adjuvant containing MPL and QS21. This adjuvant has been shown by GSK to be as potent as the similar adjuvant ASOIB but to be less reactogenic using HBsAg as vaccine antigen [Leroux-Roels et al., IABS Conference, April 2013]. In certain embodiments, TLR agonists are used as adjuvants. In other embodiment, adjuvants which break immune tolerance are included in the immunogenic compositions.

[0133] In certain embodiments, the compositions and methods comprise any suitable agent or immune modulation which could modulate mechanisms of host immune tolerance and release of the induced antibodies. In non-limiting embodiments modulation includes PD-1 blockade; T regulatory cell depletion; CD40L hyperstimulation; soluble antigen administration, wherein the soluble antigen is designed such that the soluble agent eliminates B cells targeting dominant epitopes, or a combination thereof. In certain embodiments, an immunomodulatory agent is administered in at time and in an amount sufficient for transient modulation of the subject's immune response so as to induce an immune response which comprises broad neutralizing antibodies against HIV-1 envelope. Non-limiting examples of such agents is any one of the agents described herein: e.g. chloroquine (CQ), PTPIB Inhibitor-CAS 765317-72-4-Calbiochem or MSI 1436 clodronate or any other bisphosphonate; a Foxol inhibitor, e.g. 344355 | Foxol Inhibitor, AS1842856-Calbiochem; Gleevac, anti-CD25 antibody, anti-CCR4 Ab, an agent which binds to a B cell receptor for a dominant HIV-1 envelope epitope, or any combination thereof. In non-limiting embodiments, the modulation includes administering an anti-CTLA4 antibody. Non-limiting examples are ipilimumab and tremelimumab. In certain embodiments, the methods comprise administering a second immunomodulatory agent, wherein the second and first immunomodulatory agents are different

[0134] There are various host mechanisms that control bnAbs. For example, highly somatically mutated antibodies become autoreactive and/or less fit (Immunity 8:751, 1998; PloS Comp. Biol. 6 e1000800, 2010; J. Thoret. Biol. 164:37, 1993); Polyreactive/autorcactive naïve B cell receptors (unmutated common ancestors of clonal lineages) can lead to deletion of Ab precursors (Nature 373:252, 1995; PNAS 107:181, 2010; J. Immunol. 187:3785, 2011); Abs with long HCDR3 can be limited by tolerance deletion (JI 162:6060, 1999; JCI 108:879, 2001). BnAb knock-in mouse models are providing insights into the various mechanisms of tolerance control of MPER BnAb induction (deletion, anergy, receptor editing). Other variations of tolerance control likely will be operative in limiting BnAbs with long HCDR3s, high levels of somatic hypermutations.

[0135] For a summary of CH505 sequences and designs see U.S. Pat. No. 10,968,255, e.g. but not limited to Table 1, FIGS. 22-24, and U.S. Pat. No. 10,004,800 (FIG. 17).

[0136] It is readily understood that the envelope glycoproteins referenced in various examples and figures comprise a signal/leader sequence. It is well known in the art that HIV-I envelope glycoprotein is a secretory protein with a signal or leader peptide sequence that is removed during processing and recombinant expression (without removal of the signal peptide, the protein is not secreted). See for example Li et al. Control of expression, glycosylation, and secretion of HIV-1 gp120 by homologous and heterologous signal sequences. Virology 204 (1): 266-78 (1994) (“Li et al. 1994″), at first paragraph, and Li et al. Effects of inefficient cleavage of the signal sequence of HIV-1 gp120 on its association with calnexin, folding, and intracellular transport. PNAS 93:9606-9611 (1996) (“Li et al. 1996”), at 9609, Any suitable signal sequence could be used. In some embodiments the leader sequence is the endogenous leader sequence. Most of the gp120 and gp160 amino acid sequences include the endogenous leader sequence. In other non-limiting examples, the leader sequence is human Tissue Plasminogen Activator (TPA) sequence, human CD5 leader sequence (e.g. MPMGSLQPLATLYLLGMLVASVLA). Most of the chimeric designs include CD5 leader sequence. A skilled artisan appreciates that when used as immunogens, and for example when recombinantly produced, the amino acid sequences of these proteins do not comprise the leader peptide sequences.

### HIV-1 Envelope Trimers and Other Envelope Designs

[0137] This example shows that stabilized HIV-1 Env trimer immunogens show enhanced antigenicity for broadly neutralizing antibodies and are not recognized by non-neutralizing antibodies. The example also describes additional envelope modifications and designs. In some embodiments these envelopes, including but not limited to trimers are further multimerized, and/or used as particulate, high-density array in liposomes or other particles, for example but not limited to nanoparticles. Any one of the envelopes of the invention could be designed and expressed as described herein.

[0138] A stabilized chimeric SOSIP designs were used to generate CH505 trimers. This design was applicable to diverse viruses from multiple clades.

[0139] Elicitation of neutralizing antibodies is one goal for antibody-based vaccines. Neutralizing antibodies target the native trimeric HIV-1 Env on the surface virions. The trimeric HIV-1 envelope protein consists of three protomers each containing a gp120 and gp41 heterodimer. Recent immunogen design efforts have generated soluble near-native mimics of the Env trimer that bind to neutralizing antibodies but not non-neutralizing antibodies. The recapitulation of the native trimer could be a key component of vaccine induction of neutralizing antibodies. Neutralizing Abs target the native trimeric HIV-1 Env on the surface of viruses (Poignard et al. J Virol. 2003 January; 77 (1): 353-65; Parren et al. J Virol. 1998 December; 72 (12): 10270-4.; Yang et al. J Virol. 2006 November; 80 (22): 11404-8.). The HIV-1 Env protein consists of three protomers of gp120 and gp41 heterodimers that are noncovalently linked together (Center et al. J Virol. 2002 August; 76 (15): 7863-7.). Soluble near-native trimers preferentially bind neutralizing antibodies as opposed to non-neutralizing antibodies (Sanders et al. PLoS Pathog. 2013 September; 9 (9): e1003618).

[0140] Sequential Env vaccination has elicited broad neutralization in the plasma of one macaque. The overall goal of our project is to increase the frequency of vaccine induction of bnabs in the plasma of primates with Env vaccination. We hypothesized that vaccination with immunogens that target bnAb B cell lineage and mimic native trimers will increase the frequency of broadly neutralizing plasma antibodies. One goal is increasing the frequency of vaccine induction of bnAb in the plasma of primates by Env vaccination. It is expected that vaccination with immunogens that target bnAb B cell lineages and mimic the native trimers on virions will increase the frequency of broadly neutralizing plasma antibodies.

[0141] Previous work has shown that CH505 derived soluble trimers are hard to produce. From a study published by Julien et al in 2015 (Proc Natl Acad Sci USA. 2015 Sep. 22; 112 (38): 11947-11952.) it was shown that while CH505 produced comparable amounts of protein by transient transfection, only 5% of the CH505 protein formed trimer which 5 times lower than the gold standard viral strain BG505. Provided here are non-limiting embodiments of well-folded trimers for Env immunizations.

[0142] Near-native soluble trimers using the 6R.SOSIP.664 design are capable of generating autologous tier 2 neutralizing plasma antibodies in the plasma (Sanders et al. 2015), which provides a starting point for designing immunogens to elicit broadly neutralizing antibodies. While these trimers are preferentially antigenic for neutralizing antibodies, they still possess the ability to expose the V3 loop, which generally results in strain-specific binding and neutralizing antibodies after vaccination. Using the unliganded structure the BG505.6R.SOSIP.664 has been stabilized by adding cysteines at position 201 and 433 to constrain the conformational flexibility such that the V3 loop is maintained unexposed (Kwon et al. Nat Struct Mol Biol. 2015 July; 22 (7): 522-531.).

[0143] Provided are engineered trimeric immunogens derived from multiple viruses from CH505. We generated chimeric 6R.SOSIP.664, chimeric disulfide stabilized (DS) 6R.SOSIP.664 (Kwon et al Nat Struct Mol Biol. 2015 July; 22 (7): 522-531.), chimeric 6R.SOSIP.664v4.1 (DeTaeye et al. Cell. 2015 Dec. 17; 163 (7): 1702-15. doi: 10.1016/j.cell.2015.11.056), and chimeric 6R.SOSIP.664v4.2 (DeTaeye et al. Cell. 2015 Dec. 17; 163 (7): 1702-15. doi: 10.1016/j.cell.2015.11.056). The 6R.SOSIP.664 is the basis for all of these designs and is made as a chimera of C.CH0505 and A.BG505. The gp120 of C.CH505 was fused with the BG505 inner domain gp120 sequence within the alpha helix 5 (α5) to result in the chimeric protein. The chimeric gp120 is disulfide linked to the A.BG505 gp41 as outlined by Sanders et al. (PLoS Pathog. 2013 September; 9 (9): e1003618). These immunogens were designed as chimeric proteins that possess the BG505 gp41 connected to the CH505 gp120, since the BG505 strain is particularly adept at forming well-folded, closed trimers. This envelope design retains the CH505 CD4 binding site that is targeted by the CH103 and CH235 broadly neutralizing antibody lineages that were isolated from CH505.

[0144] Based on the various designs, any other suitable envelope, for example but not limited to CH505 envelopes as described in U.S. Pat. No. 10,004,800, incorporated herein by reference, can be designed. Other suitable envelopes include, but are not limited to, CAP256SU, CAP256wk34.80, CAM13, Q23, an T250 envelopes.

[0145] Recombinant envelopes as trimers could be produced and purified by any suitable method. For a non-limiting example of purification methods see Ringe R P, Yasmeen A, Ozorowski G, Go E P, Pritchard L K, Guttman M, Ketas T A, Cottrell C A, Wilson I A, Sanders R W, Cupo A, Crispin M, Lee K K, Desaire H, Ward A B, Klasse P J, Moore J P. 2015. Influences on the design and purification of soluble, recombinant native-like HIV-1 envelope glycoprotein trimers. J Virol 89:12189-12210. doi: 10.1128/JVI.01768-15.

### Multimeric Envelopes

[0146] Presentation of antigens as particulates reduces the B cell receptor affinity necessary for signal transduction and expansion (See Baptista et al. EMBO J. 2000 Feb. 15; 19 (4): 513-520). Displaying multiple copies of the antigen on a particle provides an avidity effect that can overcome the low affinity between the antigen and B cell receptor. The initial B cell receptor specific for pathogens can be low affinity, which precludes vaccines from being able to stimulate and expand B cells of interest. In particular, very few naïve B cells from which HIV-1 broadly neutralizing antibodies arise can bind to soluble HIV-1 Envelope. Provided are envelopes, including but not limited to trimers as particulate, high-density array on liposomes or other particles, for example but not limited to nanoparticles. See e.g. He et al. Nature Communications 7, Article number: 12041 (2016), doi: 10.1038/ncomms12041; Bamrungsap et al. Nanomedicine, 2012, 7 (8), 1253-1271.

[0147] To improve the interaction between the naïve B cell receptor and immunogens, envelope designed can be created to wherein the envelope is presented on particles, e.g. but not limited to nanoparticle. In some embodiments, the HIV-1 Envelope trimer could be fused to ferritin. Ferritin protein self assembles into a small nanoparticle with three fold axis of symmetry. At these axes the envelope protein is fused. Therefore, the assembly of the three-fold axis also clusters three HIV-1 envelope protomers together to form an envelope trimer. Each ferritin particle has 8 axes which equates to 8 trimers being displayed per particle. See e.g. Sliepen et al. Retrovirology201512: 82, DOI: 10.1186/s12977-015-0210-4.

[0148] Any suitable ferritin sequence could be used. In non-limiting embodiments, ferritin sequences are disclosed in U.S. Pat. No. 10,961,283, incorporated herein by reference.

[0149] Ferritin nanoparticle linkers: The ability to form HIV-1 envelope ferritin nanoparticles relies self-assembly of 24 ferritin subunits into a single ferritin nanoparticle. The addition of a ferritin subunit to the C-terminus of HIV-1 envelope may interfere with the ability of the ferritin subunit to fold properly and or associate with other ferritin subunits. When expressed alone ferritin readily forms 24-subunit nanoparticles, however appending it to envelope only yields nanoparticles for certain envelopes. Since the ferritin nanoparticle forms in the absence of envelope, the envelope could be sterically bindering the association of ferritin subunits. Thus, we designed ferritin with elongated glycine-serine linkers to further distance the envelope from the ferritin subunit. To make sure that the glycine linker is attached to ferritin at the correct position, we created constructs that attach at second amino acid position or the fifth amino acid position. The first four n-terminal amino acids of natural Helicobacter pylori ferritin are not needed for nanoparticle formation but may be critical for proper folding and oligomerization when appended to envelope. Thus, we designed constructs with and without the Leucine, serine, and lysine amino acids following the glycine-serine linker. The goal will be to find a linker length that is suitable for formation of envelope nanoparticles when ferritin is appended to most envelopes. Any suitable linker between the envelope and ferritin could be uses, so long as the fusion protein is expressed and the trimer is formed.

[0150] Another approach to multimerize expression constructs uses staphylococcus Sortase A transpeptidase ligation to conjugate inventive envelope trimers, for e.g. but not limited to cholesterol. Non-limiting embodiments of envelope designs for use in Sortase A reaction are shown in FIGS. 5A-B and FIG. 14. The trimers can then be embedded into liposomes via the conjugated cholesterol. To conjugate the trimer to cholesterol either a C-terminal LPXTG tag or a N-terminal pentaglycine repeat tag is added to the envelope trimer gene. Cholesterol is also synthesized with these two tags. Sortase A is then used to covalently bond the tagged envelope to the cholesterol. The sortase A-tagged trimer protein can also be used to conjugate the trimer to other peptides, proteins, or fluorescent labels. In non-limiting embodiments, the sortase A tagged trimers are conjugated to ferritin to form nanoparticles. Any suitable ferritin can be used.

[0151] The invention provides design of envelopes and trimer designs wherein the envelope comprises a linker which permits addition of a lipid, such as but not limited to cholesterol, via a Sortase A reaction. See e.g. Tsukiji, S. and Nagamune, T. (2009), Sortase-Mediated Ligation: A Gift from Gram-Positive Bacteria to Protein Engineering. ChemBioChem, 10:787-798. Doi: 10.1002/cbic.200800724; Proft, T. Sortase-mediated protein ligation: an emerging biotechnology tool for protein modification and 35mmobilization. Biotechnol Lett (2010) 32:1. Doi: 10.1007/s10529-009-0116-0; Lena Schmohl, Dirk Schwarzer, Sortase-mediated ligations for the site-specific modification of proteins, Current Opinion in Chemical Biology, Volume 22, October 2014, Pages 122-128, ISSN 1367-5931, dx.doi.org/10.1016/j.cbpa.2014.09.020; Tabata et al. Anticancer Res. 2015 August; 35 (8): 4411-7; Pritz et al. J. Org. Chem. 2007, 72, 3909-3912.

[0152] The lipid modified envelopes and trimers could be formulated as liposomes. Any suitable liposome composition is contemplated.

[0153] The lipid modified and multimerized envelopes and trimers could be formulated as liposomes. Any suitable liposome composition is contemplated.

[0154] Nomenclature for trimers: chim.6R.DS.SOSIP.664 is SOSIP.I; CHIM.6R.SOSIP.664 is SOSIP.II; CHIM.6R.SOSIP.664V4.1 is SOSIP.III.

### V2 Optimization

[0155] The CH505 HIV-I virus has been subject to intensive study as a vaccine reagent based on the observation that during the course of the natural CH505 HIV-1 infection, potent broadly neutralizing antibodies were generated by the host that targeted the CD4bs region. Here we have designed an immunogen based on the surprising finding that the HIV-1 CH505 transmitted-founder (TF) virus Envelopes, when used as vaccine, have the capacity to induce V2 apex directed heterologous neutralizing antibody responses. This has been observed in a knoc—in mice, rabbits and rhesus macaques, and in one CH505 SHIV infected macaque. These results raise the prospect of ultimately creating a dual-targeting CH505-based immunogen design that can induce both V2 apex and CD4bs broadly neutralizing antibodies (bNAbs). The designs we propose focus on enhancing both the initiation of appropriate V2 apex targeting neutralizing antibody and expand the breadth of the response.

[0156] Despite the fact the CH505 TF Envelope can elicit V2 apex neutralizing antibody responses, it is not particularly sensitive to mature V2 apex bNAbs and is not neutralized by putative V2 apex bNAb precursors. We hypothesized that these factors could be limit the successful V2 apex bNAb induction, and that CH505 TF variants with improved sensitivity to V2 apex mature and precursor antibodies might serve as better immunogens.

[0157] Thus, we used our previously published statistically robust and phylogenetically corrected strategy to compare the CH505 TF to amino acid and glycan signatures that associate with sensitivity to multiple V2 apex bNAbs (Bricault et al. Cell Host Microbe (2019) 25:59-72). We found that CH505 TF carried resistance signatures at 10 sites, and by introducing favorable mutations at these sites, we designed a variant called V2 SET OPT (signature-based epitope targeted optimized) (FIG. 1). Shorter and more positively charged bypervariable V1 and V2 loops are significantly associated with neutralization sensitivity by mature V2 apex bNAbs, so we also introduced optimal V1 and V2 hypervariable loops from two natural Envs, ZM233.6 and T250-4, respectively, into our constructs.

[0158] We next applied signature analyses to neutralization data for 109-208 global viruses tested against unmutated or early ancestral antibodies that ultimately gave rise to antibody lineages that targeted the V2 apex and potent broadly neutralizing antibodies: CH04 UCA, CAP256-VRC26 and PCT64 early intermediates, and heavy and/or light chain germline reverted PG9 and PGT145. Using this strategy, we identified signatures associated with sensitivity to V2 apex precursors (FIG. 2).

[0159] The hypervariable loop characteristics associated with sensitivity to V2 apex precursors were similar to those of the mature, and hence, the hypervariable V1 and V2 loop modifications from V2 SET OPT were retained.

[0160] The first round of V2 optimization was successful in improving sensitivity to all mature V2 apex bNAbs and for 2 out of 6 UCAs tested (CH01 and PCT64). A further round of iterative design optimization was carried out to improve reactivity against the remaining 4 UCAs. These designs introduced three mutations H130D, K169R and Q170R. The first mutation was based on the consideration that D-130 was a sensitivity signature for PCT64 UCA (while H-130 was sensitivity signature for CH04 UCA) and was introduced with the aim of improving sensitivity to PCT64 UCA. The K169R and Q170R mutations were introduced with the aim of improving sensitivity to PG9 and PG16 UCAs. Both of these mutations were found to improve the PG9 and PG16 UCAs in the background of an SIV strain, while the latter Q170R was also found to be the strongest sensitivity signature associated with sensitivity to fully germline reverted PG9 antibody (both heavy and light chains reverted) in the PG9 epitope. Introduction of these 3 mutations in the context of CH505.TF.V2UCA.OPT2.N332 was found to improve sensitivity to PG9 and PG16 UCAs, while retaining sensitivity to CH01 and PCT64 UCAs and to all mature V2 apex bNAbs.

[0161] In non-limiting embodiments, these vaccines are being expressed as chimeric SOSIP proteins, and so have CH505 TF gp120s, with a BG505 gp41 that end at HIV-1 HXB2 numbering position 664. SOSIP proteins are modified Env proteins that are stabilized for expression as native-like soluble trimers.

[0162] These sensitivity mutations in a CH505 TF background expressed as SOSIP proteins we propose will result in immunogens that are more susceptible to V2-apex antibodies, and thus may be better able to trigger and stimulate them.

[0163] The modified sequence we are suggesting trying as immunogens are enclosed. We start the alignment with CH505.IF as a reference, the natural transmitted founder virus that we are building mutations into. We follow with full length protein sequences that contain the amino acid modifications we believe may be advantageous. We include the natural strains ZM233.6 and T250-4 in the alignment, as we included their hypervariable regions.

[0164] Table 1 shows V2 Optimized CH505 TF immunogens

| Gene number | Protein name | Immunogen criteria |
|---|---|---|
| HV1301908 | CH505TF_V2.UCA.OPT1.gp41mut_ch.SOSIP.v4.1 | Optimized gp120 and gp41 based on |
| | | V2-glycan bnAb UCA neutralization |
| HV1301909 | CH505TF_V2.UCA.OPT1.N332.gp41mut_ch.SOSIP.v4.1 | Optimized gp120 and gp41 based on |
| | | V2-glycan bnAb UCA neutralization |
| HV1301910 | CH505TF_V2.SET.OPT_ch.SOSIPv4.1 | Optimized gp120 based on V2-glycan |
| | | bnAb neutralization |
| HV1301911 | CH505TF_V2.SET.OPT.N332_ch.SOSIPv4.1 | Optimized gp120 based on V2-glycan |
| | | bnAb neutralization with N332 |
| | | glycan hole filled |
| HV1301912 | CH505TF_V2.UCA.OPT1_ch.SOSIPv4.1 | Optimized gp120 based on V2-glycan |
| | | bnAb UCA neutralization |
| HV1301913 | CH505TF_V2.UCA.OPT1.N332_ch.SOSIP.v4.1 | Optimized gp120 based on V2-glycan |
| | | bnAb UCA neutralization with N332 |
| | | glycan hole filled |

[0165] Non-limiting embodiments of sequences of the envelopes in Table I are described in FIGS. 3, 4, and 5 shows non-limiting embodiments of multimerization designs, including ferritin and/or sortase, which could be used as guidance to design V2OPT_CH505T/F designs. In FIGS. 4C-D (see Table 2 below), CH505. V2UCAOPT.ver2 envelope sequence is shown as a gp160 envelope. This V2 optimized design could be used as the basis to design any suitable protomer, wherein in non-limiting embodiments the protomer can form stabilized trimer. Non-limiting designs of envelope protomers include SOSIP designs, designs comprising F14 mutations (See US Pub 20210379177, incorporated herein by reference), and so forth. In non-limiting embodiments, any of the envelope designs, including without limitation designs in FIG. 3, 4, or 5, could comprise mutations H130D, K169R and/or Q170R.

[0166] Table 2 shows non-limiting embodiments of optimized immunogens. See FIG. 4C-4D, 13, 16, and 17.

| Gene | Protein name-see | Non-limiting embodiments |
|---|---|---|
| number | FIGS. 8-12, 16, 17 | are shown in Figs. |
| | CH505.V2UCAOPT.ver2 (Optimized | FIG. 4C-4D |
| | CH505 T/F envelope) | |
| | CH505_V2SETOPT | FIG. 13 |
| | CH505_V2SETOPT_N332 | FIG. 13 |
| | CH505_V2UCAOPT1 | FIG. 13 |
| | CH505_V2UCAOPT1_N332 | FIG. 13 |
| | CH505_V2UCAOPT2 | FIG. 13 |
| | CH505_V2UCAOPT2_N332 | FIG. 13 |
| | CH505_V2UCAOPT_v3.0 | FIG. 13 |
| | CH505_UCA_OPT2_N332_H130D_K169R_K170R is called | |
| | CH505_V2UCA_OPT_v3.0 | |
| | CH505_V2UCAOPT_v3.0_D167N | FIG. 13 |
| | CAP256SU_UCA_OPT_2.0 | FIG. 13 |
| | CAP256SU_UCA_OPT_3.0 | FIG. 13 |
| | CAP256SU_UCA_OPT_3.0_K170R | FIG. 13 |
| | CAM13RRK | FIG. 13 |
| | CAM13RRK_K130H | FIG. 13 |
| | CAM13RRK_ΔV1 | FIG. 13 |
| | CAM13RRK_ΔV1_K130H | FIG. 13 |
| | CAM13RRK_K130H_natV1hV2hswap_natgly | FIG. 13 |
| | CAM13RRK_K130H_optV1hV2hswap_optgly | FIG. 13 |
| | CAP256_wk34.80_V2UCA_OPT | FIG. 16 |
| | CAP256_wk34.80_V2UCA_OPT_R171K | FIG. 16 |
| | CAP256_wk34.80_PCT64UCA_OPT | FIG. 16 |
| | CAP256SU_UCA_OPT_4.0_D167N | FIG. 16 |
| | CAM13RRRK | FIG. 17 |
| | HIV_CAP256SU_UCA_OPT_4.0 | FIG. 17 |
| | CAP256SU_UCA_OPT_4.0_375S | FIG. 17 |
| | CAP256SU_UCA_OPT_4.0_Y375S_D167N | FIG. 17 |
| | CAP256_wk34.80_V2UCA_OPT_RRK | FIG. 17 |
| | CAP256_wk34.80_V2UCA_OPT_RRK_D167N | FIG. 17 |
| | mrna1_CAP256SU_UCA_OPT_4.0 | FIG. 17 |
| | mrna2_CAP256SU_UCA_OPT_4.0 | FIG. 17 |
| HV1303230 | HIV_CAP256SU_UCA_OPT_4.0 | FIG. 17 |
| | F14(A204V_V208L_V68I_V2SSL)_gp160_{—} | |
| | IGHVss_deltaG_SOSL.GS_I535M_Y712I | |
| HV1303231 | HIV_CAP256SU_UCA_OPT_4.0 | FIG. 17 |
| | F14(A204V_V208L_V68I_V255L)_gp160_{—} | |
| | IGHVss_deltaG_DS.SOSL.GS_I535M_{—} | |
| | Y712I_LL855/6AA | |
| HV1303232 | HIV_CAP256SU_UCA_OPT_4.0 | FIG. 17 |
| | F14(A204V_V208L_V68I_V255L)_{—} | |
| | RnS3mut2G_gp160_IGHVss_deltaG_{—} | |
| | DS.SOSL.GS_I535M_Y712I_LL855/6AA | |
| HV1303233 | HIV_CAP256SU_UCA_OPT_4.0_F14(A204V_{—} | FIG. 17 |
| | V208L_V68I_V255L)_gp160_IGHVss_{—} | |
| | deltaG_DS.SOSL.GS_I535M.PC._Y712I_{—} | |
| | H66A_T316W_LL855/6AA | |
| HV1303234 | HIV_CAP256SU_UCA_OPT_4.0_F14(A204V_{—} | FIG. 17 |
| | V208L_V68I_V255L)_RnS3mut2G_{—} | |
| | gp160_IGHVss_deltaG_DS.SOSL.GS_{—} | |
| | I535M.PC._Y712I_H66A_T316W_LL855/6AA | |
| HV1303235 | HIV_CAP256SU_UCA_OPT_4.0 | FIG. 17 |
| | F14(A204V_V208L_V68I_V2SSL)_IGHVss_{—} | |
| | deltaG_SOSL.GS_I535M_gp145.712 | |
| HV1303236 | HIV_CAP256SU_UCA_OPT_4.0 | FIG. 17 |
| | F14(A204V_V208L_V68I_V255L)_IGHVss_{—} | |
| | deltaG_DS.SOSL.GS_I535M_gp145.712 | |
| HV1303237 | HIV_CAP256SU_UCA_OPT_4.0 | FIG. 17 |
| | F14(A204V_V208L_V68I_V255L)_{—} | |
| | RnS3mut2G_IGHVss_deltaG_DS.SOSL.GS_{—} | |
| | I535M_gp145.712 | |
| HV1303238 | HIV_CAP256SU_UCA_OPT_4.0 | FIG. 17 |
| | F14(A204V_V208L_V68I_V255L)_{—} | |
| | IGHVss_deltaG_DS.SOSL.GS_{—} | |
| | I535M.PC.H66A_T316W_gp145.712 | |
| HV1303239 | HIV_CAP256SU_UCA_OPT_4.0F14(A204V_{—} | FIG. 17 |
| | V208L_V68I_V255L)_RnS3mut2G_{—} | |
| | IGHVss_deltaG_DS.SOSL.GS_{—} | |
| | I535M.PC.H66A_T316W_gp145.712 | |
| HV1303240 | HIV_CAP256SU_UCA_OPT_4.0 | FIG. 17 |
| | F14(A204V_V208L_V68I_V255L)_{—} | |
| | IGHVss_deltaG_SOSL.GS_I535M_{—} | |
| | Y712I_gp150.755 | |
| HV1303241 | HIV_CAP256SU_UCA_OPT_4.0 | FIG. 17 |
| | F14(A204V_V208L_V68I_V255L)_{—} | |
| | IGHVss_deltaG_DS.SOSL.GS_I535M_{—} | |
| | Y712I_gp150.755 | |
| HV1303242 | HIV_CAP256SU_UCA_OPT_4.0 | FIG. 17 |
| | F14(A204V_V208L_V68I_V255L)_{—} | |
| | RnS3mut2G_IGHVss_deltaG_DS.SOSL.GS_{—} | |
| | I535M_Y712I_gp150.755 | |
| HV1303243 | HIV_CAP256SU_UCA_OPT_4.0 | FIG. 17 |
| | F14(A204V_V208L_V68I_V255L)_{—} | |
| | IGHVss_deltaG_DS.SOSL.GS_I535M.PC._{—} | |
| | Y712I_H66A_T316W_gp150.755 | |
| HV1303244 | HIV_CAP256SU_UCA_OPT_4.0F14(A204V_{—} | FIG. 17 |
| | V208L_V68I_V255L)_RnS3mut2G_{—} | |
| | IGHVss_deltaG_DS.SOSL.GS_I535M.PC._{—} | |
| | Y712I_H66A_T316W_gp150.755 | |
| HV1303245 | HIV_CAP256SU_UCA_OPT_4.0 | FIG. 17 |
| | F14(A204V_V208L_V68I_V255L)_{—} | |
| | IGHVss_deltaG_SOSL.GS_I535M_Y712I_{—} | |
| | gp150.750 | |
| HV1303246 | HIV_CAP256SU_UCA_OPT_4.0 | FIG. 17 |
| | F14(A204V_V208L_V68I_V255L)_{—} | |
| | IGHVss_deltaG_DS.SOSL.GS_I535M_{—} | |
| | Y712I_gp150.750 | |
| HV1303247 | HIV_CAP256SU_UCA_OPT_4.0 | FIG. 17 |
| | F14(A204V_V208L_V68I_V255L)_{—} | |
| | RnS3mut2G_IGHVss_deltaG_DS.SOSL.GS_{—} | |
| | I535M_Y712I_gp150.750 | |
| HV1303248 | HIV_CAP256SU_UCA_OPT_4.0 | FIG. 17 |
| | F14(A204V_V208L_V68I_V255L)_{—} | |
| | IGHVss_deltaG_DS.SOSL.GS_I535M.PC._{—} | |
| | Y712I_H66A_T316W_gp150.750 | |
| HV1303249 | HIV_CAP256SU_UCA_OPT_4.0F14(A204V_{—} | FIG. 17 |
| | V208L_V68I_V255L)_RnS3mut2G_{—} | |
| | IGHVss_deltaG_DS.SOSL.GS_I535M.PC._{—} | |
| | Y712I_H66A_T316W_gp150.750 | |
| HV1303250 | HIV_CAP256SU_UCA_OPT_4.0 | FIG. 17 |
| | F14(A204V_V208L_V68I_V255L)_gp160_{—} | |
| | BPrlss_deltaG_SOSL.GS_I535M_Y712I | |
| HV1303251 | HIV_CAP256SU_UCA_OPT_4.0 | FIG. 17 |
| | F14(A204V_V208L_V68I_V255L)_BPrlss_{—} | |
| | deltaG_SOSL.GS_I535M_gp145.712 | |
| HV1303252 | HIV_CAP256SU_UCA_OPT_4.0 | FIG. 17 |
| | F14(A204V_V208L_V68I_V255L)_BPrlss_{—} | |
| | deltaG_SOSL.GS_I535M_Y712I_{—} | |
| | gp150.755 | |
| HV1303253 | HIV_CAP256SU_UCA_OPT_4.0 | FIG. 17 |
| | F14(A204V_V208L_V68I_V255L)_BPrlss_{—} | |
| | deltaG_SOSL.GS_I535M_Y712I_{—} | |
| | gp150.750 | |
| HV1303254 | HIV_CAP256SU_UCA_OPT_4.0 | FIG. 17 |
| | F14(A204V_V208L_V68I_V255L)_gp160_{—} | |
| | BPrlss_deltaG_DS.SOSL.GS_I535M_{—} | |
| | Y712I_LL855/6AA | |
| HV1303049 | CAP256.wk34.c80 SOSIP.RnS2 | FIG. 17 |
| HV1303050 | CAP256.wk34.c80_V2UCAOPT_v3.0 | FIG. 17 |
| | SOSIP.RnS2 | |
| | Q23.17_V2UCAOPT | FIG. 17 |
| | Q23.17_V2UCAOPT_GLY | FIG. 17 |
| | Q23.17_V2UCAOPT_ALT | FIG. 17 |
| | Q23.17_V2UCAOPT_GLY_ALT | FIG. 17 |
| HV1301552 | A.Q23_17CHIM.SOSIPV5.2.8/293F | FIG. 17 |

[0167] FIG. 5 shows non-limiting embodiments of multimerization designs, including ferritin and/or sortase, which could be used as guidance to design any of the envelopes in Table 2 or 4 as multimeric designs. In FIGS. 4C-D, CH505 V2UCAOPT.ver2 envelope sequence is shown as a gp160 envelope. This V2 optimized design could be used as the basis to design any suitable protomer, wherein in non-limiting embodiments the protomer can form a stabilized trimer. Non-limiting designs of envelope protomers include SOSIP designs, designs comprising F14 mutations (See US Pub 20210379177, incorporated herein by reference), and so forth.

[0168] Table 3 shows non-limiting embodiments of optimized immunogens-sortase design, See FIG. 14.

| Plasmid ID | |
|---|---|
| gene number | Protein name |
| HV1302426 | T250_V2UCAOPT_v3.DS.SOSIP_TPAss_cSorta |
| HV1302427 | T250_V2UCAOPT_v3.DS.SOSIP_CDSss_cSorta |
| HV1302428 | T250_V2UCAOPT_v3.DS.SOSIP_Abss_cSorta |
| HV1302429 | CH505_V2UCAOPT_v3.0_cSORTA |
| HV1302430 | CAP256SU_V2UCAOPT_v3.0.DS.6R.SOSIP.664_TPAss_cSORTA |
| HV1302431 | CAP256SU_V2UCAOPT_v3.0.DS.6R.SOSIP.664_CDSss_cSORTA |
| HV1302432 | CAP256SU_V2UCAOPT_v3.0.DS.6R.SOSIP.664_mVHss_cSORTA |
| HV1302433 | CAP256SU_V2UCAOPT_v3.0.DS.6R.SOSIPv6.664_mVHss_cSORTA |
| HV1302434 | CAP256SU_V2UCAOPT_v3.0.DS.6R.SOSIPv6.664_CD5ss_cSORTA |
| HV1302435 | CAP256SU_V2UCAOPT_v3.0.DS.6R.SOSIPv6.664_TPAss_cSORTA |
| HV1302436 | CAM13.RRK.6R.DS.SOSIPgp140.664.CD5ss_opt_cSORTA |
| HV1302437 | CAM13.RRK.6R.DS.SOSIP.UFO_cSORTA |
| HV1302438 | CAM13.RRK.6R.DS.SOSIPv6_cSORTA |

[0169] The trimer could be incorporated in a nanoparticle, including without limitation any ferritin based nanoparticle.

[0170] Throughout the application amino acid positions numbers refer to HXB2 numbering.

[0171] Any of the immunogens herein may be encoded by a nucleic acid. FIGS. 4A, 4D, 5A, 5B, 5E, 14 and 17 provide non-limiting examples of nucleic acids encoding an immunogen. In certain embodiments, the nucleic acid may be a DNA, an RNA, or an mRNA. Non-limiting examples of mRNA nucleic acids encoding an immunogen of the present technology include, but are not limited to, 2560_pUC-ccTEV-co.mRNAI_CAP256SU_UCA_OPT_4.0.A101, 2560_pUC-ccTEV-co.mRNA2_CAP256SU_UCA_OPT_4.0A101, 2560_pUC-ccTEV-coA.Q23_17CHIM.SOSIPV5.2.8 293F (HV1301552)-A101, 2560_pUC-ccTEV-coCAP256.wk34.c80 SOSIP.RnS2 (HV1303049)-A101, 2560_pUC-ccTEV-coCAP256.wk34.c80_V2UCAOPT_v3.0 SOSIP.RnS2 (HV1303050)-A101, 2560_pUC-ccTEV-coHV1303230-A101, 2560_pUC-ccTEV-coHV1303231-A101, 2560_pUC-ccTEV-coHV1303232-A101, 2560_pUC-ccTEV-coHV1303233-A101, 2560_pUC-ccTEV-coHV1303234-A101, 2560_pUC-ccTEV-coHV1303235-A101, 2560_pUC-ccTEV-coHV1303236-A101, 2560_pUC-ccTEV-coHV1303237-A101, 2560_pUC-ccTEV-coHV1303238-A101, 2560_pUC-ccTEV-coHV1303239-A101, 2560_pUC-ccTEV-coHV1303240-A101, 2560_pUC-ccTEV-coHV1303241-A101, 2560_pUC-ccTEV-coHV1303242-A101, 2560_pUC-ccTEV-coHV1303243-A101, 2560_pUC-ccTEV-coHV1303244-A101, 2560_pUC-ccTEV-coHV1303245-A101, 2560_pUC-ccTEV-coHV1303246-A101, 2560_pUC-ccTEV-coHV1303247-A101, 2560_pUC-ccTEV-coHV1303248-A101, 2560_pUC-ccTEV-coHV1303249-A101, 2560_pUC-ccTEV-coHV1303250-A101, 2560_pUC-ccTEV-coHV1303251-A101, 2560_pUC-ccTEV-coHV1303252-A101, 2560 pUC-ccTEV-coHV1303253-A101, 2560_pUC-ccTEV-coHV1303254-A101, 2560_pUC-ccTEV-coHV1303326,A.Q23.6R.DS.SOS.GS.I535M.K658Q_E659D_Igss-A101, 2560_pUC-ccTEV-coHV1303327,A.Q23.DS.SOSL.GS.1535M.K658Q_E659D_Igss-A101, 2560_pUC-ccTEV-coHV1303328,A.Q23.6R.DS.SOS.GS.I535M.K658Q_E659D_Igss-A101, and 2560_pUC-ccTEV-coHV1303329,A.Q23.DS.SOSL.GS.1535M.K658Q_E659D_Igss-A101. It will be understood that non-identical nucleic acid sequences may encode the same amino acid sequence. As such these examples do not exclude nucleic acid sequences that encode immunogens with the same amino acid sequence but possess different nucleic acid sequences.

[0172] Exemplary constructs are provided in Table 4.

| | | Soluble or | Stabilization/ | | Furin | |
|---|---|---|---|---|---|---|
| | | membrane | Expression | Signal | Cleavage | Cytoplasmic |
| Construct | Description | anchored | mutations | Peptide | Site | tail (CT) |
| HIV_CAP256SU_{—} | Full length | Membrane | None | Wildtype | Wildtype | Wildtype |
| UCA_OPT_4.0 | Env | anchored | | | | |
| mmal_CAP256SU_{—} | Protein | Membrane | Sodroski; | Signal | Glycine- | SIVMac CT |
| UCA_OPT_4.0 | | anchored | Y712I | peptide #1 | Serine | RPVFSSPPSYFQ |
| | | | | MAISGV | linker #1 | |
| | | | | PVLGFFI | | |
| | | | | IAVLMS | | |
| | | | | AQESWA | | |
| mma2_CAP256SU_{—} | Protein | Membrane | Sodroski; | Signal | Glycine- | SIVMac CT |
| UCA_OPT_4.0 | | anchored | Y712I; F14 | peptide #1 | Serine | RPVFSSPPSYFQ |
| | | | | MAISGV | linker #1 | |
| | | | | PVLGFFI | | |
| | | | | IAVLMS | | |
| | | | | AQESWA | | |
| CAP256.wk34.c80_{—} | Protein | Soluble | SOSIP; DS; | IGHVss | RRRRRR | N/A |
| V2UCAOPT_v3.0 | | | 3mut; 2G; | | | |
| SOSIP.RnS2(HV1303050) | | | RnS | | | |
| HV1303230, HIV_{—} | Protein | Membrane | F14, deltaG, SOS, | IGHVss | Glycine- | Wildtype |
| CAP256SU_UCA_OPT_4.0 | | anchored | GS, I535M, | | Serine | |
| F14(A204V_V208L_{—} | | | Y712I | | linker #1 | |
| V68I_V255L)_gp160_{—} | | | | | (also | |
| IGHVss_deltaG_{—} | | | | | labeled | |
| SOSL.GS_I535M_Y712I | | | | | as “L”) | |
| HV1303231, HIV_{—} | Protein | Membrane | F14, deltaG, | IGHVss | Glycine- | Wildtype |
| CAP256SU_UCA_OPT_4.0 | | anchored | SOS, GS, | | Serine | |
| F14(A204V_V208L_{—} | | | I535M, Y712I, | | linker #1 | |
| V68I_V255L)_gp160_{—} | | | LL855/6AA | | (also | |
| IGHVss_deltaG_{—} | | | | | labeled | |
| DS.SOSL.GS_I535M_{—} | | | | | as “L”) | |
| Y712I_LL855/6AA | | | | | | |
| HV1303232, HIV_{—} | Protein | Membrane | F14, RnS, | IGHVss | Glycine- | Wildtype |
| CAP256SU_UCA_OPT_4.0 | | anchored | 3mut, 2G, | | Serine | |
| F14(A204V_V208L_{—} | | | deltaG, SOS, | | linker #1 | |
| V68I_V255L)_{—} | | | GS, I535M, | | (also | |
| RnS3mut2G_gp160_{—} | | | Y712I, | | labeled | |
| IGHVss_deltaG_{—} | | | LL855/6AA | | as “L”) | |
| DS.SOSL.GS_I535M_{—} | | | | | | |
| Y712I_LL855/6AA | | | | | | |
| HV1303233, HIV_{—} | Protein | Membrane | F14, deltaG, | IGHVss | Glycine- | Wildtype |
| CAP256SU_UCA_OPT_{—} | | anchored | DS, SOS, GS, | | Serine | |
| 4.0 F14(A204V_{—} | | | I535M, PC,, | | linker #1 | |
| V208L_V68I_V255L)_{—} | | | Y712I, H66A, | | (also | |
| gp160_IGHVss_{—} | | | T316W, | | labeled | |
| deltaG_DS.SOSL.GS_{—} | | | LL855/6AA | | as “L”) | |
| I535M.PC._Y712I_{—} | | | | | | |
| H66A_T316W_LL855/ | | | | | | |
| 6AA | | | | | | |
| HV1303234, HIV_{—} | Protein | Membrane | F14, RnS, | IGHVss | Glycine- | Wildtype |
| CAP256SU_UCA_OPT_{—} | | anchored | 3mut, 2G, | | Serine | |
| 4.0_F14(A204V_{—} | | | deltaG, DS, | | linker #1 | |
| V208L_V68I_V255L)_{—} | | | SOS, GS, | | (also | |
| RS3mut2G_gp160_{—} | | | I535M, PC,, | | labeled | |
| IGHVss_deltaG_{—} | | | Y712I, H66A, | | as “L”) | |
| DS.SOSL.GS_I535M.PC._{—} | | | T316W, | | | |
| Y712I_H66A_T316W_{—} | | | LL855/6AA | | | |
| LL855/6AA | | | | | | |
| HV1303235, HIV_{—} | Protein | Membrane | F14, deltaG, | IGHVss | Glycine- | Truncated |
| CAP256SU_UCA_OPT_4.0 | | anchored | SOS, GS, | | Serine | beyond HXB2 |
| F14(A204V_V208L_{—} | | | I535M | | linker #1 | position 712 |
| V68I_V255L)_IGHVss_{—} | | | | | (also | |
| deltaG_SOSL.GS | | | | | labeled | |
| I535M_gp145.712 | | | | | as “L”) | |
| HV1303236, HIV_{—} | Protein | Membrane | F14, deltaG, | IGHVss | Glycine- | Truncated |
| CAP256SU_UCA_OPT_4.0 | | anchored | DS, SOS, GS, | | Serine | beyond HXB2 |
| F14(A204V_V208L_{—} | | | I535M | | linker #1 | position 712 |
| V68I_V255L)_IGHVss_{—} | | | | | (also | |
| deltaG_DS.SOSL.GS_{—} | | | | | labeled | |
| I535M_gp145.712 | | | | | as “L”) | |
| HV1303237, HIV_{—} | Protein | Membrane | F14, RnS, | IGHVss | Glycine- | Truncated |
| CAP256SU_UCA_OPT_4.0 | | anchored | 3mut, 2G, | | Serine | beyond HXB2 |
| F14(A204V_V208L_{—} | | | deltaG, DS, | | linker #1 | position 712 |
| V68I_V255L)_RnS3mut2G_{—} | | | SOS, GS, | | (also | |
| IGHVss_deltaG_{—} | | | I535M | | labeled | |
| DS.SOSL.GS_I535M_{—} | | | | | as “L”) | |
| gp145.712 | | | | | | |
| HV1303238, HIV_{—} | Protein | Membrane | F14, deltaG, | IGHVss | Glycine- | Truncated |
| CAP256SU_UCA_OPT_4.0 | | anchored | DS, SOS, GS, | | Serine | beyond HXB2 |
| F14(A204V_V208L_{—} | | | I535M, PC, | | linker #1 | position 712 |
| V68I_V255L)_IGHVss_{—} | | | H66A, T316W | | (also | |
| deltaG_DS.SOSL.GS_{—} | | | | | labeled | |
| I535M.PC.H66A_{—} | | | | | as “L”) | |
| T316W_gp145.712 | | | | | | |
| HV1303239, HIV_{—} | Protein | Membrane | F14, RnS, | IGHVss | Glycine- | Truncated |
| CAP256SU_UCA_OPT_{—} | | anchored | 3mut, 2G, | | Serine | beyond HXB2 |
| 4.0F14(A204V_V208L_{—} | | | deltaG, DS, | | linker #1 | position 712 |
| V68I_V255L)_{—} | | | SOS, GS, | | (also | |
| RnS3mut2G_IGHVss_{—} | | | I535M, PC, | | labeled | |
| deltaG_DS.SOSL.GS_{—} | | | H66A, T316W | | as “L”) | |
| I535M.PC.H66A_{—} | | | | | | |
| T316W_gp145.712 | | | | | | |
| HV1303240, HIV_{—} | Protein | Membrane | F14, deltaG, | IGHVss | Glycine- | Truncated |
| CAP256SU_UCA_OPT_4.0 | | anchored | SOS, GS, | | Serine | beyond HXB2 |
| F14(A204V_V208L_{—} | | | I535M, Y712I | | linker #1 | position 755 |
| V68I_V255L)_IGHVss_{—} | | | | | (also | |
| deltaG_SOSL.GS_{—} | | | | | labeled | |
| I535M_Y712I_gp150.755 | | | | | as “L”) | |
| HV1303241, HIV_{—} | Protein | Membrane | F14, deltaG, | IGHVss | Glycine- | Truncated |
| CAP256SU_UCA_OPT_4.0 | | anchored | DS, SOS, GS, | | Serine | beyond HXB2 |
| F14(A204V_V208L_{—} | | | I535M, Y712I | | linker #1 | position 755 |
| V68I_V255L)_IGHVss_{—} | | | | | (also | |
| deltaG_DS.SOSL.GS_{—} | | | | | labeled | |
| I535M_Y712I_gp150.755 | | | | | as “L”) | |
| HV1303242, HIV_{—} | Protein | Membrane | F14, RnS, | IGHVss | Glycine- | Truncated |
| CAP256SU_UCA_OPT_4.0 | | anchored | 3mut, 2G, | | Serine | beyond HXB2 |
| F14(A204V_V208L_{—} | | | deltaG, DS, | | linker #1 | position 755 |
| V68I_V255L)_RnS3mut2G_{—} | | | SOS, GS, | | (also | |
| IGHVss_deltaG_{—} | | | I535M, Y712I | | labeled | |
| DS.SOSL.GS_I535M_{—} | | | | | as “L”) | |
| Y712I_gp150.755 | | | | | | |
| HV1303243, HIV_{—} | Protein | Membrane | F14, deltaG, | IGHVss | Glycine- | Truncated |
| CAP256SU_UCA_OPT_4.0 | | anchored | DS, SOS, GS, | | Serine | beyond HXB2 |
| F14(A204V_V208L_{—} | | | I535M, PC,, | | linker #1 | position 755 |
| V68I_V255L)_IGHVss_{—} | | | Y712I, H66A, | | (also | |
| deltaG_DS.SOSL.GS_{—} | | | T316W | | labeled | |
| I535M.PC._Y712I_{—} | | | | | as “L”) | |
| H66A_T316W_gp150.755 | | | | | | |
| HV1303244, HIV_{—} | Protein | Membrane | F14, RnS, | IGHVss | Glycine- | Truncated |
| CAP256SU_UCA_OPT_{—} | | anchored | 3mut, 2G, | | Serine | beyond HXB2 |
| 4.0F14(A204V_V208L_{—} | | | deltaG, DS, | | linker #1 | position 755 |
| V68I_V255L)_{—} | | | SOS, GS, | | (also | |
| RnS3mut2G_IGHVss_{—} | | | I535M, PC,, | | labeled | |
| deltaG_DS.SOSL.GS_{—} | | | Y712I, H66A, | | as “L”) | |
| I535M.PC._Y712I_{—} | | | T316W | | | |
| H66A_T316W_gp150.755 | | | | | | |
| HV1303245, HIV_{—} | Protein | Membrane | F14, deltaG, | IGHVss | Glycine- | Truncated |
| CAP256SU_UCA_OPT_4.0 | | anchored | SOS, GS, | | Serine | beyond HXB2 |
| F14(A204V_V208L_{—} | | | I535M, Y712I | | linker #1 | position 750 |
| V68I_V255L)_IGHVss_{—} | | | | | (also | |
| deltaG_SOSL.GS_{—} | | | | | labeled | |
| I535M_Y712I_gp150.750 | | | | | as “L”) | |
| HV1303246, HIV_{—} | Protein | Membrane | F14, deltaG, | IGHVss | Glycine- | Truncated |
| CAP256SU_UCA_OPT_4.0 | | anchored | DS, SOS, GS, | | Serine | beyond HXB2 |
| F14(A204V_V208L_{—} | | | I535M, Y712I | | linker #1 | position 750 |
| V68I_V255L)_IGHVss_{—} | | | | | (also | |
| deltaG_DS.SOSL.GS_{—} | | | | | labeled | |
| I535M_Y712I_gp150.750 | | | | | as “L”) | |
| HV1303247, HIV_{—} | Protein | Membrane | F14, RnS, | IGHVss | Glycine- | Truncated |
| CAP256SU_UCA_OPT_4.0 | | anchored | 3mut, 2G, | | Serine | beyond HXB2 |
| F14(A204V_V208L_{—} | | | deltaG, DS, | | linker #1 | position 750 |
| V68I_V255L)_RnS3mut2G_{—} | | | SOS, GS, | | (also | |
| IGHVss_deltaG_{—} | | | I535M, Y712I | | labeled | |
| DS.SOSL.GS_I535M_{—} | | | | | as “L”) | |
| Y712I_gp150.750 | | | | | | |
| HV1303248, HIV_{—} | Protein | Membrane | F14, deltaG, | IGHVss | Glycine- | Truncated |
| CAP256SU_UCA_OPT_4.0 | | anchored | DS, SOS, GS, | | Serine | beyond HXB2 |
| F14(A204V_V208L_{—} | | | I535M, PC,, | | linker #1 | position 750 |
| V68I_V255L)_IGHVss_{—} | | | Y712I, H66A, | | (also | |
| deltaG_DS.SOSL.GS_{—} | | | T316W | | labeled | |
| I535M.PC._Y712I_{—} | | | | | as “L”) | |
| H66A_T316W_gp150.750 | | | | | | |
| HV1303249, HIV_{—} | Protein | Membrane | F14, RnS, | IGHVss | Glycine- | Truncated |
| CAP256SU_UCA_OPT_{—} | | anchored | 3mut, 2G, | | Serine | beyond HXB2 |
| 4.0F14(A204V_V208L_{—} | | | deltaG, DS, | | linker #1 | position 750 |
| V68I_V255L)_{—} | | | SOS, GS, | | (also | |
| RnS3mut2G_IGHVss_{—} | | | I535M, PC, | | labeled | |
| deltaG_DS.SOSL.GS_{—} | | | Y712I, H66A, | | as “L”) | |
| I535M.PC._Y712I_{—} | | | T316W | | | |
| H66A_T316W_gp150.750 | | | | | | |
| HV1303250, HIV_{—} | Protein | Membrane | F14, deltaG, | BPrlss | Glycine- | Truncated |
| CAP256SU_UCA_OPT_4.0 | | anchored | SOS, GS, | | Serine | beyond HXB2 |
| F14(A204V_V208L_{—} | | | I535M, Y712I | | linker #1 | position 712 |
| V68I_V255L)_gp160_{—} | | | | | (also | |
| BPrlss_deltaG_{—} | | | | | labeled | |
| SOSL.GS_I535M_Y712I | | | | | as “L”) | |
| HV1303251, HIV_{—} | Protein | Membrane | F14, deltaG, | BPrlss | Glycine- | Truncated |
| CAP256SU_UCA_OPT_4.0 | | anchored | SOS, GS, | | Serine | beyond HXB2 |
| F14(A204V_V208L_{—} | | | I535M | | linker #1 | position 712 |
| V68I_V255L)_BPrlss_{—} | | | | | (also | |
| deltaG_SOSL.GS_{—} | | | | | labeled | |
| I535M_gp145.712 | | | | | as “L”) | |
| HV1303252, HIV_{—} | Protein | Membrane | F14, deltaG, | BPrlss | Glycine- | Truncated |
| CAP256SU_UCA_OPT_4.0 | | anchored | SOS, GS, | | Serine | beyond HXB2 |
| F14(A204V_V208L_{—} | | | I535M, Y712I | | linker #1 | position 755 |
| V68I_V255L)_BPrlss_{—} | | | | | (also | |
| deltaG_SOSL.GS_{—} | | | | | labeled | |
| I535M_Y712I_gp150.755 | | | | | as “L”) | |
| HV1303253, HIV_{—} | Protein | Membrane | F14, deltaG, | BPrlss | Glycine- | Truncated |
| CAP256SU_UCA_OPT_4.0 | | anchored | SOS, GS, | | Serine | beyond HXB2 |
| F14(A204V_V208L_{—} | | | I535M, Y712I | | linker #1 | position 750 |
| V68I_V255L)_BPrlss_{—} | | | | | (also | |
| deltaG_SOSL.GS_{—} | | | | | labeled | |
| I535M_Y712I_gp150.750 | | | | | as “L”) | |
| HV1303254, HIV_{—} | Protein | Membrane | F14, deltaG, | BPrlss | Glycine- | Wildtype |
| CAP256SU_UCA_OPT_4.0 | | anchored | DS, SOS, GS, | | Serine | |
| F14(A204V_V208L_{—} | | | I535M, Y712I, | | linker #1 | |
| V68I_V255L)_gp160_{—} | | | LL855/6AA | | (also | |
| BPrlss_deltaG_{—} | | | | | labeled | |
| DS.SOSL.GS_I535M_{—} | | | | | as “L”) | |
| Y712I_LL855/6AA | | | | | | |
| HV1303326, A.Q23.6R. | Protein | Soluble | 6R; DS; SOS; | IGHVss | RRRRRR | N/A |
| DS.SOS.GS.I535M. | | | GS; I535M; | | | |
| K658Q_E659D_Igss | | | K658Q; | | | |
| | | | E659D; Igss | | | |
| HV1303327, A.Q23. | Protein | Soluble | DS; SOSL; GS; | IGHVss | Glycine- | N/A |
| DS.SOSL.GS.I535M. | | | I535M; K658Q; | | Serine | |
| K658Q_E659D_Igss | | | E659D; Igss | | linker #1 | |
| | | | | | (also | |
| | | | | | labeled | |
| | | | | | as ‘L’) | |
| HV1303328, A.Q23.6R. | Protein | Soluble | 6R; DS; SOS; | IGHVss | RRRRRR | N/A |
| DS.SOS.GS.I535M. | | | GS; I535M; | | | |
| K658Q_E659D_Igss_cSorta | | | K658Q; E659D; | | | |
| | | | Igss; cSorta | | | |
| HV1303329, A.Q23. | Protein | Soluble | DS; SOSL; GS; | IGHVss | Glycine- | N/A |
| DS.SOSL.GS.I535M. | | | I535M; K658Q; | | Serine | |
| K658Q_E659D_Igss_cSorta | | | E659D; Igss; | | linker #1 | |
| | | | cSorta | | (also | |
| | | | | | labeled | |
| | | | | | as ‘L’) | |
| 2560_pUC-ccTEV- | mRNA | Membrane | mRNA immunogen | See protein | See protein | See protein |
| co.mRNA1_CAP256SU_{—} | | anchored | construct for | construct | construct | construct |
| UCA_OPT_4.0.A101 | | | mma1_CAP256SU | above. | above. | above. |
| | | | UCA_OPT_4.0. | | | |
| | | | Modifications: | | | |
| | | | mRNA codon | | | |
| | | | optimization; | | | |
| | | | 2560_pUC-ccTEV- | | | |
| | | | A101 5′UTR; | | | |
| | | | 2560_pUC-ccTEV- | | | |
| | | | A101 3′UTR; | | | |
| | | | Poly A | | | |
| 2560_pUC-ccTEV- | mRNA | Membrane | mRNA immunogen | See protein | See protein | See protein |
| co.mRNA2_CAP256SU_{—} | | anchored | construct for | construct | construct | construct |
| UCA_OPT_4.0A101 | | | mrna2_CAP256SU_{—} | above. | above. | above. |
| | | | UCA_OPT_4.0. | | | |
| | | | Modifications: | | | |
| | | | mRNA codon | | | |
| | | | optimization; | | | |
| | | | 2560_pUC-ccTEV- | | | |
| | | | A101 5′UTR; | | | |
| | | | 2560_pUC-ccTEV- | | | |
| | | | A101 3′UTR; | | | |
| | | | Poly A | | | |
| 2560_pUC-ccTEV-coA.Q23_{—} | mRNA | Membrane | mRNA immunogen | See protein | See protein | See protein |
| 17CHIM.SOSIPV5.2.8_293F | | anchored | construct for Q23_{—} | construct | construct | construct |
| (HV1301552)-A101 | | | 17CHIM.SOSIPV5.2.8 | above. | above. | above. |
| | | | 293F (HV1301552). | | | |
| | | | Modifications: | | | |
| | | | mRNA codon | | | |
| | | | optimization; | | | |
| | | | 2560_pUC-ccTEV- | | | |
| | | | A101 5′UTR; | | | |
| | | | 2560_pUC-ccTEV- | | | |
| | | | A101 3′UTR; | | | |
| | | | Poly A | | | |
| 2560_pUC-ccTEV- | mRNA | Membrane | mRNA immunogen | See protein | See protein | See protein |
| coCAP256.wk34.c80 | | anchored | construct for | construct | construct | construct |
| SOSIP.RnS2 | | | CAP256.wk34.c80 | above. | above. | above. |
| (HV1303049)-A101 | | | SOSIP.RnS2 | | | |
| | | | (HV1303049). | | | |
| | | | Modifications: | | | |
| | | | mRNA codon | | | |
| | | | optimization; | | | |
| | | | 2560_pUC-ccTEV- | | | |
| | | | A101 5′UTR; | | | |
| | | | 2560_pUC-ccTEV- | | | |
| | | | A101 3′UTR; | | | |
| | | | Poly A | | | |
| 2560_pUC-ccTEV- | mRNA | Membrane | mRNA immunogen | See protein | See protein | See protein |
| coCAP256.wk34.c80_{—} | | anchored | construct for | construct | construct | construct |
| V2UCAOPT_v3.0 | | | CAP256.wk34.c80_{—} | above. | above. | above. |
| SOSIP.RnS2(HV1303050)- | | | V2UCAOPT_v3.0 | | | |
| A101 | | | SOSIP.RnS2 | | | |
| | | | (HV1303050). | | | |
| | | | Modifications: | | | |
| | | | mRNA codon | | | |
| | | | optimization; | | | |
| | | | 2560_pUC-ccTEV- | | | |
| | | | A101 5′UTR; | | | |
| | | | 2560_pUC-ccTEV- | | | |
| | | | A101 3′UTR; | | | |
| | | | Poly A | | | |
| 2560_pUC-ccTEV- | mRNA | Membrane | mRNA immunogen | See protein | See protein | See protein |
| coHV1303230-A101 | | anchored | construct for | construct | construct | construct |
| | | | HV1303230 above. | above. | above. | above. |
| | | | Modifications: | | | |
| | | | mRNA codon | | | |
| | | | optimization; | | | |
| | | | 2560_pUC-ccTEV- | | | |
| | | | A101 5′UTR; | | | |
| | | | 2560_pUC-ccTEV- | | | |
| | | | A101 3′UTR; | | | |
| | | | Poly A | | | |
| 2560_pUC-ccTEV- | mRNA | Membrane | mRNA immunogen | See protein | See protein | See protein |
| coHV1303231-A101 | | anchored | construct for | construct | construct | construct |
| | | | HV1303231 above. | above. | above. | above. |
| | | | Modifications: | | | |
| | | | mRNA codon | | | |
| | | | optimization; | | | |
| | | | 2560_pUC-ccTEV- | | | |
| | | | A101 5′UTR; | | | |
| | | | 2560_pUC-ccTEV- | | | |
| | | | A101 3′UTR; | | | |
| | | | Poly A | | | |
| 2560_pUC-ccTEV- | mRNA | Membrane | mRNA immunogen | See protein | See protein | See protein |
| coHV1303232-A101 | | anchored | construct for | construct | construct | construct |
| | | | HV1303232 above. | above. | above. | above. |
| | | | Modifications: | | | |
| | | | mRNA codon | | | |
| | | | optimization; | | | |
| | | | 2560_pUC-ccTEV- | | | |
| | | | A101 5′UTR; | | | |
| | | | 2560_pUC-ccTEV- | | | |
| | | | A101 3′UTR; | | | |
| | | | Poly A | | | |
| 2560_pUC-ccTEV- | mRNA | Membrane | mRNA immunogen | See protein | See protein | See protein |
| coHV1303233-A101 | | anchored | construct for | construct | construct | construct |
| | | | HV1303233 above. | above. | above. | above. |
| | | | Modifications: | | | |
| | | | mRNA codon | | | |
| | | | optimization; | | | |
| | | | 2560_pUC-ccTEV- | | | |
| | | | A101 5′UTR; | | | |
| | | | 2560_pUC-ccTEV- | | | |
| | | | A101 3′UTR; | | | |
| | | | Poly A | | | |
| 2560_pUC-ccTEV- | mRNA | Membrane | mRNA immunogen | See protein | See protein | See protein |
| coHV1303234-A101 | | anchored | construct for | construct | construct | construct |
| | | | HV1303234 above. | above. | above. | above. |
| | | | Modifications: | | | |
| | | | mRNA codon | | | |
| | | | optimization; | | | |
| | | | 2560_pUC-ccTEV- | | | |
| | | | A101 5′UTR; | | | |
| | | | 2560_pUC-ccTEV- | | | |
| | | | A101 3′UTR; | | | |
| | | | Poly A | | | |
| 2560_pUC-ccTEV- | mRNA | Membrane | mRNA immunogen | See protein | See protein | See protein |
| coHV1303235-A101 | | anchored | construct for | construct | construct | construct |
| | | | HV1303235 above. | above. | above. | above. |
| | | | Modifications: | | | |
| | | | mRNA codon | | | |
| | | | optimization; | | | |
| | | | 2560_pUC-ccTEV- | | | |
| | | | A101 5′UTR; | | | |
| | | | 2560_pUC-ccTEV- | | | |
| | | | A101 3′UTR; | | | |
| | | | Poly A | | | |
| 2560_pUC-ccTEV- | mRNA | Membrane | mRNA immunogen | See protein | See protein | See protein |
| coHV1303236-A101 | | anchored | construct for | construct | construct | construct |
| | | | HV1303236 above. | above. | above. | above. |
| | | | Modifications: | | | |
| | | | mRNA codon | | | |
| | | | optimization; | | | |
| | | | 2560_pUC-ccTEV- | | | |
| | | | A101 5′UTR; | | | |
| | | | 2560_pUC-ccTEV- | | | |
| | | | A101 3′UTR; | | | |
| | | | Poly A | | | |
| 2560_pUC-ccTEV- | mRNA | Membrane | mRNA immunogen | See protein | See protein | See protein |
| coHV1303237-A101 | | anchored | construct for | construct | construct | construct |
| | | | HV1303237 above. | above. | above. | above. |
| | | | Modifications: | | | |
| | | | mRNA codon | | | |
| | | | optimization; | | | |
| | | | 2560_pUC-ccTEV- | | | |
| | | | A101 5′UTR; | | | |
| | | | 2560_pUC-ccTEV- | | | |
| | | | A101 3′UTR; | | | |
| | | | Poly A | | | |
| 2560_pUC-ccTEV- | mRNA | Membrane | mRNA immunogen | See protein | See protein | See protein |
| coHV1303238-A101 | | anchored | construct for | construct | construct | construct |
| | | | HV1303238 above. | above. | above. | above. |
| | | | Modifications: | | | |
| | | | mRNA codon | | | |
| | | | optimization; | | | |
| | | | 2560_pUC-ccTEV- | | | |
| | | | A101 5′UTR; | | | |
| | | | 2560_pUC-ccTEV- | | | |
| | | | A101 3′UTR; | | | |
| | | | Poly A | | | |
| 2560_pUC-ccTEV- | mRNA | Membrane | mRNA immunogen | See protein | See protein | See protein |
| coHV1303239-A101 | | anchored | construct for | construct | construct | construct |
| | | | HV1303239 above. | above. | above. | above. |
| | | | Modifications; | | | |
| | | | mRNA codon | | | |
| | | | optimization; | | | |
| | | | 2560_pUC-ccTEV- | | | |
| | | | A101 5′UTR; | | | |
| | | | 2560_pUC-ccTEV- | | | |
| | | | A101 3′UTR; | | | |
| | | | Poly A | | | |
| 2560_pUC-ccTEV- | mRNA | Membrane | mRNA immunogen | See protein | See protein | See protein |
| coHV1303240-A101 | | anchored | construct for | construct | construct | construct |
| | | | HV1303240 above. | above. | above. | above. |
| | | | Modifications: | | | |
| | | | mRNA codon | | | |
| | | | optimization; | | | |
| | | | 2560_pUC-ccTEV- | | | |
| | | | A101 5′UTR; | | | |
| | | | 2560_pUC-ccTEV- | | | |
| | | | A101 3′UTR; | | | |
| | | | Poly A | | | |
| 2560_pUC-ccTEV- | mRNA | Membrane | mRNA immunogen | See protein | See protein | See protein |
| coHV1303241-A101 | | anchored | construct for | construct | construct | construct |
| | | | HV1303241 above. | above. | above. | above. |
| | | | Modifications: | | | |
| | | | mRNA codon | | | |
| | | | optimization; | | | |
| | | | 2560_pUC-ccTEV- | | | |
| | | | A101 5′UTR; | | | |
| | | | 2560_pUC-ccTEV- | | | |
| | | | A101 3′UTR; | | | |
| | | | Poly A | | | |
| 2560_pUC-ccTEV- | mRNA | Membrane | mRNA immunogen | See protein | See protein | See protein |
| coHV1303242-A101 | | anchored | construct for | construct | construct | construct |
| | | | HV1303242 above. | above. | above. | above. |
| | | | Modifications: | | | |
| | | | mRNA codon | | | |
| | | | optimization; | | | |
| | | | 2560_pUC-ccTEV- | | | |
| | | | A101 5′UTR; | | | |
| | | | 2560_pUC-ccTEV- | | | |
| | | | A101 3′UTR; | | | |
| | | | Poly A | | | |
| 2560_pUC-ccTEV- | mRNA | Membrane | mRNA immunogen | See protein | See protein | See protein |
| coHV1303243-A101 | | anchored | construct for | construct | construct | construct |
| | | | HV1303243 above. | above. | above. | above. |
| | | | Modifications: | | | |
| | | | mRNA codon | | | |
| | | | optimization; | | | |
| | | | 2560_pUC-ccTEV- | | | |
| | | | A101 5′UTR; | | | |
| | | | 2560_pUC-ccTEV- | | | |
| | | | A101 3′UTR; | | | |
| | | | Poly A | | | |
| 2560_pUC-ccTEV- | mRNA | Membrane | mRNA immunogen | See protein | See protein | See protein |
| coHV1303244-A101 | | anchored | construct for | construct | construct | construct |
| | | | HV1303244 above. | above. | above. | above. |
| | | | Modifications: | | | |
| | | | mRNA codon | | | |
| | | | optimization; | | | |
| | | | 2560_pUC-ccTEV- | | | |
| | | | A101 5′UTR; | | | |
| | | | 2560_pUC-ccTEV- | | | |
| | | | A101 3′UTR; | | | |
| | | | Poly A | | | |
| 2560_pUC-ccTEV- | mRNA | Membrane | mRNA immunogen | See protein | See protein | See protein |
| coHV1303245-A101 | | anchored | construct for | construct | construct | construct |
| | | | HV1303245 above. | above. | above. | above. |
| | | | Modifications: | | | |
| | | | mRNA codon | | | |
| | | | optimization; | | | |
| | | | 2560_pUC-ccTEV- | | | |
| | | | A101 5′UTR; | | | |
| | | | 2560_pUC-ccTEV- | | | |
| | | | A101 3′UTR; | | | |
| | | | Poly A | | | |
| 2560_pUC-ccTEV- | mRNA | Membrane | mRNA immunogen | See protein | See protein | See protein |
| coHV1303246-A101 | | anchored | construct for | construct | construct | construct |
| | | | HV1303246 above. | above. | above. | above. |
| | | | Modifications: | | | |
| | | | mRNA codon | | | |
| | | | optimization; | | | |
| | | | 2560_pUC-ccTEV- | | | |
| | | | A101 5′UTR; | | | |
| | | | 2560_pUC-ccTEV- | | | |
| | | | A101 3′UTR; | | | |
| | | | Poly A | | | |
| 2560_pUC-ccTEV- | mRNA | Membrane | mRNA immunogen | See protein | See protein | See protein |
| coHV1303247-A101 | | anchored | construct for | construct | construct | construct |
| | | | HV1303247 above. | above. | above. | above. |
| | | | Modifications: | | | |
| | | | mRNA codon | | | |
| | | | optimization; | | | |
| | | | 2560_pUC-ccTEV- | | | |
| | | | A101 5′UTR; | | | |
| | | | 2560_pUC-ccTEV- | | | |
| | | | A101 3′UTR; | | | |
| | | | Poly A | | | |
| 2560_pUC-ccTEV- | mRNA | Membrane | mRNA immunogen | Sec protein | See protein | See protein |
| coHV1303248-A101 | | anchored | construct for | construct | construct | construct |
| | | | HV1303248 above. | above. | above. | above. |
| | | | Modifications: | | | |
| | | | mRNA codon | | | |
| | | | optimization; | | | |
| | | | 2560_pUC-ccTEV- | | | |
| | | | A101 5′UTR; | | | |
| | | | 2560_pUC-ccTEV- | | | |
| | | | A101 3′UTR; | | | |
| | | | Poly A | | | |
| 2560_pUC-ccTEV- | mRNA | Membrane | mRNA immunogen | See protein | See protein | See protein |
| coHV1303249-A101 | | anchored | construct for | construct | construct | construct |
| | | | HV1303249 above. | above. | above. | above. |
| | | | Modifications: | | | |
| | | | mRNA codon | | | |
| | | | optimization; | | | |
| | | | 2560_pUC-ccTEV- | | | |
| | | | A101 5′UTR; | | | |
| | | | 2560_pUC-ccTEV- | | | |
| | | | A101 3′UTR; | | | |
| | | | Poly A | | | |
| 2560_pUC-ccTEV- | mRNA | Membrane | mRNA immunogen | See protein | See protein | See protein |
| coHV1303250-A101 | | anchored | construct for | construct | construct | construct |
| | | | HV1303250 above. | above. | above. | above. |
| | | | Modifications: | | | |
| | | | mRNA codon | | | |
| | | | optimization; | | | |
| | | | 2560_pUC-ccTEV- | | | |
| | | | A101 5′UTR; | | | |
| | | | 2560_pUC-ccTEV- | | | |
| | | | A101 3′UTR; | | | |
| | | | Poly A | | | |
| 2560_pUC-ccTEV- | mRNA | Membrane | mRNA immunogen | See protein | See protein | See protein |
| coHV1303251-A101 | | anchored | construct for | construct | construct | construct |
| | | | HV1303251 above. | above. | above. | above. |
| | | | Modifications: | | | |
| | | | mRNA codon | | | |
| | | | optimization; | | | |
| | | | 2560_pUC-ccTEV- | | | |
| | | | A101 5′UTR; | | | |
| | | | 2560_pUC-ccTEV- | | | |
| | | | A101 3′UTR; | | | |
| | | | Poly A | | | |
| 2560_pUC-ccTEV- | mRNA | Membrane | mRNA immunogen | See protein | See protein | See protein |
| coHV1303252-A101 | | anchored | construct for | construct | construct | construct |
| | | | HV1303252 above. | above. | above. | above. |
| | | | Modifications: | | | |
| | | | mRNA codon | | | |
| | | | optimization; | | | |
| | | | 2560_pUC-ccTEV- | | | |
| | | | A101 5′UTR; | | | |
| | | | 2560_pUC-ccTEV- | | | |
| | | | A101 3′UTR; | | | |
| | | | Poly A | | | |
| 2560_pUC-ccTEV- | mRNA | Membrane | mRNA immunogen | See protein | See protein | See protein |
| coHV1303253-A101 | | anchored | construct for | construct | construct | construct |
| | | | HV1303253 above. | above. | above. | above. |
| | | | Modifications: | | | |
| | | | mRNA codon | | | |
| | | | optimization; | | | |
| | | | 2560_pUC-ccTEV- | | | |
| | | | A101 5′UTR; | | | |
| | | | 2560_pUC-ccTEV- | | | |
| | | | A101 3′UTR; | | | |
| | | | Poly A | | | |
| 2560_pUC-ccTEV- | mRNA | Membrane | mRNA immunogen | See protein | See protein | See protein |
| coHV1303254-A101 | | anchored | construct for | construct | construct | construct |
| | | | HV1303254 above. | above. | above. | above. |
| | | | Modifications: | | | |
| | | | mRNA codon | | | |
| | | | optimization; | | | |
| | | | 2560_pUC-ccTEV- | | | |
| | | | A101 5′UTR; | | | |
| | | | 2560_pUC-ccTEV- | | | |
| | | | A101 3′UTR; | | | |
| | | | Poly A | | | |
| 2560_pUC-ccTEV- | mRNA | Membrane | mRNA immunogen | See protein | See protein | See protein |
| coHV1303326, A.Q23. | | anchored | construct for | construct | construct | construct |
| 6R.DS.SOS.GS.I535M. | | | HV1303326, | above. | above. | above. |
| K658Q_E659D_Igss-A101 | | | A.Q23.6R.DS. | | | |
| | | | SOS.GS.I535M. | | | |
| | | | K658Q_E659D. | | | |
| | | | Modifications: | | | |
| | | | mRNA codon | | | |
| | | | optimization; | | | |
| | | | 2560_pUC-ccTEV- | | | |
| | | | A101 5′UTR; | | | |
| | | | 2560_pUC-ccTEV- | | | |
| | | | A101 3′UTR; | | | |
| | | | Poly A | | | |
| 2560_pUC-ccTEV- | mRNA | Membrane | mRNA immunogen | See protein | See protein | See protein |
| coHV1303327, | | anchored | construct for | construct | construct | construct |
| A.Q23.DS.SOSL.GS. | | | HV1303327, | above. | above. | above. |
| I535M.K658Q_E659D_{—} | | | A.Q23.DS.SOSL. | | | |
| Igss-A101 | | | GS.I535M.K658Q_{—} | | | |
| | | | E659D. | | | |
| | | | Modifications: | | | |
| | | | mRNA codon | | | |
| | | | optimization; | | | |
| | | | 2560_pUC-ccTEV- | | | |
| | | | A101 5′UTR; | | | |
| | | | 2560_pUC-ccTEV- | | | |
| | | | A101 3′UTR; | | | |
| | | | Poly A | | | |
| 2560_pUC-ccTEV- | mRNA | Membrane | mRNA immunogen | See protein | See protein | See protein |
| coHV1303328, | | anchored | construct | construct | construct | construct |
| A.Q23.6R.DS.SOS.GS. | | | forHV1303328, | above. | above. | above. |
| I535M.K658Q_E659D_{—} | | | A.Q23.6R.DS.SOS. | | | |
| Igss-A101 | | | GS.I535M.K658Q_{—} | | | |
| | | | E659D. | | | |
| | | | Modifications: | | | |
| | | | mRNA codon | | | |
| | | | optimization; | | | |
| | | | 2560_pUC-ccTEV- | | | |
| | | | A101 5′UTR; | | | |
| | | | 2560_pUC-ccTEV- | | | |
| | | | A101 3′UTR; | | | |
| | | | Poly A | | | |
| 2560_pUC-ccTEV- | mRNA | Membrane | mRNA immunogen | See protein | See protein | See protein |
| coHV1303329, | | anchored | construct for | construct | construct | construct |
| A.Q23.DS.SOSL.GS. | | | HV1303329, | above. | above. | above. |
| I535M.K658Q_E659D_{—} | | | A.Q23.DS.SOSL.GS. | | | |
| Igss-A101 | | | I535M.K658Q_E659D. | | | |
| | | | Modifications: | | | |
| | | | mRNA codon | | | |
| | | | optimization; | | | |
| | | | 2560_pUC-ccTEV- | | | |
| | | | A101 5′UTR; | | | |
| | | | 2560_pUC-ccTEV- | | | |
| | | | A101 3′UTR; | | | |
| | | | Poly A | | | |
| HV1302796, | Protein | Soluble | DS; 6R; SOS; | IGHVss | RRRRRR | N/A |
| CAP256SU_V2UCAOPT_{—} | | | GS; v6; I535M; | | | |
| v3.0.DS.6R.SOS.GS.v6_{—} | | | K658Q; | | | |
| I535M_K658Q_mIgss | | | | | | |
| HV1302797, | Protein | Soluble | DS; 6R; SOS; | IGHVss | RRRRRR | N/A |
| CAP256SU_V2UCAOPT_{—} | | | GS; I535M; | | | |
| v3.0.DS.6R.SOS.GS_{—} | | | K658Q; | | | |
| I535M_K658Q_mIgss | | | | | | |
| HV1302798, | Protein | Soluble | DS; 6R; SOS; | IGHVss | RRRRRR | N/A |
| CAP256SU_V2UCAOPT_{—} | | | UFO; v6; I535M; | | | |
| v3.0.DS.6R.SOS.UFO.v6_{—} | | | K658Q; | | | |
| I535M_K658Q_mIgss | | | | | | |
| HV1302799, | Protein | Soluble | DS; 6R; SOS; | IGHVss | RRRRRR | N/A |
| CAP256SU_V2UCAOPT_{—} | | | UFO; I535M; | | | |
| v3.0.DS.6R.SOS.UFO_{—} | | | K658Q; | | | |
| I535M_K658Q_mIgss | | | | | | |
| HV1302800, | Protein | Soluble | DS; 6R; | CD5ss | RRRRRR | N/A |
| CAP256SU_V2UCAOPT_{—} | | | chimSOSIP; | | | |
| v3.0.DS.6R.chimSOSIP.664_{—} | | | 664; cSORTA | | | |
| CD5ss_cSORTA | | | | | | |
| HV1303209, | Protein | Soluble | SOSIP; RnS2; | IGHVss | RRRRRR | N/A |
| HIV_CAP256.wk34.c80_{—} | | | c-sorta | | | |
| V2UCA_OPT_4.0_{—} | | | | | | |
| SOSIP.RnS2_c-sorta | | | | | | |
| HV1303210, | Protein | Soluble | SOSIP; RnS2; | IGHVss | RRRRRR | N/A |
| HIV_CAP256.wk34.c80_{—} | | | c-sorta | | | |
| V2UCA_OPT_4.0_D167N | | | | | | |
| SOSIP.RnS2_c-sorta | | | | | | |
| HV1303211, | Protein | Soluble | SOSIP; RnS2; | IGHVss | RRRRRR | N/A |
| HIV_CAP256.wk34.c80_{—} | | | c-sorta | | | |
| V2UCA_OPT_4.0_R171K | | | | | | |
| SOSIP.RnS2_c-sorta | | | | | | |
| HV1303212, | Protein | Soluble | SOSIP; RnS2; | IGHVss | RRRRRR | N/A |
| HIV_CAP256.wk34.c80_{—} | | | 10lnQQavi | | | |
| V2UCA_OPT_4.0SOSIP. | | | | | | |
| RnS2_10lnQQavi | | | | | | |
| HV1303213, | Protein | Soluble | SOSIP; RnS2; | IGHVss | RRRRRR | N/A |
| HIV_CAP256.wk34.c80_{—} | | | 10lnQQavi | | | |
| V2UCA_OPT_4.0_D167N | | | | | | |
| SOSIP.RnS2_10lnQQavi | | | | | | |
| HV1303214, | Protein | Soluble | SOSIP; RnS2; | IGHVss | RRRRRR | N/A |
| HIV_CAP256.wk34.c80_{—} | | | 10lnQQavi | | | |
| V2UCA_OPT_4.0_R171K | | | | | | |
| SOSIP.RnS2_10lnQQavi | | | | | | |
| HV1303332, HIV_{—} | Protein | Membrane | F14; RnS; | BPrlss | Glycine- | Truncated |
| CAP256SU_UCA_OPT_{—} | | anchored | 3mut; 2G; | | Serine | beyond HXB2 |
| 4.0F14(A204V_V208L_{—} | | | deltaG; DS; | | linker #1 | position 750 |
| V68I_V255L)_{—} | | | SOSL; GS; | | (also | |
| RnS3mut2G_BPrlss_{—} | | | I535M; PC; | | labeled | |
| deltaG_DS.SOSL.GS_{—} | | | Y712I; H66A; | | as ‘L’) | |
| I535M.PC._Y712I_{—} | | | T316W | | | |
| H66A_T316W_gp150.750 | | | | | | |
| HV1303333, HIV_{—} | Protein | Membrane | F14; deltaG; | IGHVss | Glycine- | Wildtype |
| CAP256SU_UCA_OPT_4.0 | | anchored | SOSL; GS; | | Serine | |
| F14(A204V_V208L_{—} | | | I535M; Y712I | | linker #1 | |
| V68I_V255L)_gp160_{—} | | | | | (also | |
| IGHVss_deltaG_{—} | | | | | labeled | |
| SOSL.GS_I535M_Y712I_{—} | | | | | as ‘L’) | |
| D167N | | | | | | |
| HV1303334, HIV_{—} | Protein | Membrane | F14; deltaG; | IGHVss | Glycine- | Wildtype |
| CAP256SU_UCA_OPT_4.0 | | anchored | DS; SOSL; | | Serine | |
| F14(A204V_V208L_{—} | | | GS; I535M; | | linker #1 | |
| V68I_V255L)_gp160_{—} | | | Y712I; | | (also | |
| IGHVss_deltaG_{—} | | | LL855/6AA | | labeled | |
| DS.SOSL.GS_I535M_{—} | | | | | as ‘L’) | |
| Y712I_D167N_LL855/ | | | | | | |
| 6AA | | | | | | |
| HV1303335, HIV_{—} | Protein | Membrane | F14; RnS; | IGHVss | Glycine- | Wildtype |
| CAP256SU_UCA_OPT_4.0 | | anchored | 3mut; 2G; | | Serine | |
| F14(A204V_V208L_{—} | | | deltaG; DS; | | linker #1 | |
| V68I_V255L)_RnS3mut2G_{—} | | | SOSL; GS; | | (also | |
| gp160_IGHVss_deltaG_{—} | | | I535M; | | labeled | |
| DS.SOSL.GS_I535M_{—} | | | Y712I; | | as ‘L’) | |
| Y712I_D167N_LL855/ | | | LL855/6AA | | | |
| 6AA | | | | | | |
| HV1303336, HIV_{—} | Protein | Membrane | F14; deltaG; | IGHVss | Glycine- | Wildtype |
| CAP256SU_UCA_OPT_4.0 | | anchored | DS; SOSL; | | Serine | |
| F14(A204V_V208L_{—} | | | GS; I535M; | | linker #1 | |
| V68I_V255L)_gp160_{—} | | | PC; Y712I; | | (also | |
| IGHVss_deltaG_{—} | | | H66A; T316W; | | labeled | |
| DS.SOSL.GS_I535M.PC_{—} | | | LL855/6AA | | as ‘L’) | |
| Y712I_D167N_H66A_{—} | | | | | | |
| T316W_LL855/6AA | | | | | | |
| HV1303337, HIV_{—} | Protein | Membrane | F14; RnS; | IGHVss | Glycine- | Wildtype |
| CAP256SU_UCA_OPT_{—} | | anchored | 3mut; 2G; | | Serine | |
| 4.0F14(A204V_V208L_{—} | | | deltaG; DS; | | linker #1 | |
| V68I_V255L)_{—} | | | SOSL; GS; | | (also | |
| RnS3mut2G_gp160_{—} | | | I535M; PC; | | labeled | |
| IGHVss_deltaG_{—} | | | Y712I; H66A; | | as ‘L’) | |
| DS.SOSL.GS_I535M.PC_{—} | | | T316W; | | | |
| Y712I_D167N_H66A_{—} | | | LL855/6AA | | | |
| T316W_LL855/6AA | | | | | | |
| HV1303338, HIV_{—} | Protein | Membrane | F14; deltaG; | IGHVss | Glycine- | Truncated |
| CAP256SU_UCA_OPT_4.0 | | anchored | SOSL; GS; | | Serine | beyond HXB2 |
| F14(A204V_V208L_{—} | | | I535M | | linker #1 | position 712 |
| V68I_V255L)_IGHVss_{—} | | | | | (also | |
| deltaG_SOSL.GS_{—} | | | | | labeled | |
| I535M_D167N_gp145.712 | | | | | as ‘L’) | |
| HV1303339, HIV_{—} | Protein | Membrane | F14; deltaG; | IGHVss | Glycine- | Truncated |
| CAP256SU_UCA_OPT_4.0 | | anchored | DS; SOSL; | | Serine | beyond HXB2 |
| F14(A204V_V208L_{—} | | | GS; I535M | | linker #1 | position 712 |
| V68I_V255L)_IGHVss_{—} | | | | | (also | |
| deltaG_DS.SOSL.GS_{—} | | | | | labeled | |
| I535M_D167N_gp145.712 | | | | | as ‘L’) | |
| HV1303340, HIV_{—} | Protein | Membrane | F14; RnS; | IGHVss | Glycine- | Truncated |
| CAP256SU_UCA_OPT_4.0 | | anchored | 3mut; 2G; | | Serine | beyond HXB2 |
| F14(A204V_V208L_{—} | | | deltaG; DS; | | linker #1 | position 712 |
| V68I_V255L)_RnS3mut2G_{—} | | | SOSL; GS; | | (also | |
| IGHVss_deltaG_{—} | | | I535M | | labeled | |
| DS.SOSL.GS_I535M_{—} | | | | | as ‘L’) | |
| D167N_gp145.712 | | | | | | |
| HV1303341, HIV_{—} | Protein | Membrane | F14; deltaG; | IGHVss | Glycine- | Truncated |
| CAP256SU_UCA_OPT_4.0 | | anchored | DS; SOSL; | | Serine | beyond HXB2 |
| F14(A204V_V208L_{—} | | | GS; I535M; | | linker #1 | position 712 |
| V68I_V255L)_IGHVss_{—} | | | PC; H66A; | | (also | |
| deltaG_DS.SOSL.GS_{—} | | | T316W | | labeled | |
| I535M.PC.H66A_{—} | | | | | as ‘L’) | |
| T316W_D167N_gp145.712 | | | | | | |
| HV1303342, HIV_{—} | Protein | Membrane | F14; RnS; | IGHVss | Glycine- | Truncated |
| CAP256SU_UCA_OPT_{—} | | anchored | 3mut; 2G; | | Serine | beyond HXB2 |
| 4.0F14(A204V_V208L_{—} | | | deltaG; DS; | | linker #1 | position 712 |
| V68I_V255L)_{—} | | | SOSL; GS; | | (also | |
| RnS3mut2G_IGHVss_{—} | | | I535M; PC; | | labeled | |
| deltaG_DS.SOSL.GS_{—} | | | H66A; T316W | | as ‘L’) | |
| I535M.PC.H66A_{—} | | | | | | |
| T316W_D167N_gp145.712 | | | | | | |
| HV1303343, HIV_{—} | Protein | Membrane | F14; deltaG; | IGHVss | Glycine- | Truncated |
| CAP256SU_UCA_OPT_4.0 | | anchored | SOSL; GS; | | Serine | beyond HXB2 |
| F14(A204V_V208L_{—} | | | I535M; Y712I | | linker #1 | position 755 |
| V68I_V255L)_IGHVss_{—} | | | | | (also | |
| deltaG_SOSL.GS_{—} | | | | | labeled | |
| I535M_D167N_Y712I_{—} | | | | | as ‘L’) | |
| gp150.755 | | | | | | |
| HV1303344, HIV_{—} | Protein | Membrane | F14; deltaG; | IGHVss | Glycine- | Truncated |
| CAP256SU_UCA_OPT_4.0 | | anchored | DS; SOSL; | | Serine | beyond HXB2 |
| F14(A204V_V208L_{—} | | | GS; I535M; | | linker #1 | position 755 |
| V68I_V255L)_IGHVss_{—} | | | Y712I | | (also | |
| deltaG_DS.SOSL.GS_{—} | | | | | labeled | |
| I535M_D167N_{—} | | | | | as ‘L’) | |
| Y712I_gp150.755 | | | | | | |
| HV1303345, HIV_{—} | Protein | Membrane | F14; RnS; | IGHVss | Glycine- | Truncated |
| CAP256SU_UCA_OPT_4.0 | | anchored | 3mut; 2G; | | Serine | beyond HXB2 |
| F14(A204V_V208L_{—} | | | deltaG; DS; | | linker #1 | position 755 |
| V68I_V255L)_RnS3mut2G_{—} | | | SOSL; GS; | | (also | |
| IGHVss_deltaG_{—} | | | I535M; Y712I | | labeled | |
| DS.SOSL.GS_I535M_{—} | | | | | as ‘L’) | |
| DI67N_Y712I_gp150.755 | | | | | | |
| HV1303346, HIV_{—} | Protein | Membrane | F14; deltaG; | IGHVss | Glycine- | Truncated |
| CAP256SU_UCA_OPT_4.0 | | anchored | DS; SOSL; | | Serine | beyond HXB2 |
| F14(A204V_V208L_{—} | | | GS; I535M; | | linker #1 | position 755 |
| V68I_V255L)_IGHVss_{—} | | | PC; Y712I; | | (also | |
| deltaG_DS.SOSL.GS_{—} | | | H66A; T316W | | labeled | |
| I535M.PC_D167N_Y712I_{—} | | | | | as ‘L’) | |
| H66A_T316W_gp150.755 | | | | | | |
| HV1303347, HIV_{—} | Protein | Membrane | F14; RnS; | IGHVss | Glycine- | Truncated |
| CAP256SU_UCA_OPT_{—} | | anchored | 3mut; 2G; | | Serine | beyond HXB2 |
| 4.0F14(A204V_V208L_{—} | | | deltaG; DS; | | linker #1 | position 755 |
| V68I_V255L)_{—} | | | SOSL; GS; | | (also | |
| RnS3mut2G_IGHVss_{—} | | | I535M; PC; | | labeled | |
| deltaG_DS.SOSL.GS_{—} | | | Y712I; H66A; | | as ‘L’) | |
| I535M.PC_D167N_{—} | | | T316W | | | |
| Y712I_H66A_T316W_{—} | | | | | | |
| gp150.755 | | | | | | |
| HV1303348, HIV_{—} | Protein | Membrane | F14; deltaG; | IGHVss | Glycine- | Truncated |
| CAP256SU_UCA_OPT_4.0 | | anchored | SOSL; GS; | | Serine | beyond HXB2 |
| F14(A204V_V208L_{—} | | | I535M; | | linker #1 | position 750 |
| V68I_V255L)_IGHVss_{—} | | | Y712I | | (also | |
| deltaG_SOSL.GS_{—} | | | | | labeled | |
| I535M_D167N_Y712I_{—} | | | | | as ‘L’) | |
| gp150.750 | | | | | | |
| HV1303349, HIV_{—} | Protein | Membrane | F14; deltaG; | IGHVss | Glycine- | Truncated |
| CAP256SU_UCA_OPT_4.0 | | anchored | DS; SOSL; | | Serine | beyond HXB2 |
| F14(A204V_V208L_{—} | | | GS; I535M; | | linker #1 | position 750 |
| V68I_V255L)_IGHVss_{—} | | | Y712I | | (also | |
| deltaG_DS.SOSL.GS_{—} | | | | | labeled | |
| I535M_D167N_Y712I_{—} | | | | | as ‘L’) | |
| gp150.750 | | | | | | |
| HV1303350, HIV_{—} | Protein | Membrane | F14; RnS; | IGHVss | Glycine- | Truncated |
| CAP256SU_UCA_OPT_4.0 | | anchored | 3mut; 2G; | | Serine | beyond HXB2 |
| F14(A204V_V208L_{—} | | | deltaG; DS; | | linker #1 | position 750 |
| V68I_V255L)_RnS3mut2G_{—} | | | SOSL; GS; | | (also | |
| IGHVss_deltaG_{—} | | | I535M; Y712I | | labeled | |
| DS.SOSL.GS_I535M_{—} | | | | | as ‘L’) | |
| D167N_Y712I_gp150.750 | | | | | | |
| HV1303351, HIV_{—} | Protein | Membrane | F14; deltaG; | IGHVss | Glycine- | Truncated |
| CAP256SU_UCA_OPT_4.0 | | anchored | DS; SOSL; | | Serine | beyond HXB2 |
| F14(A204V_V208L_{—} | | | GS; I535M; | | linker #1 | position 750 |
| V68I_V255L)_IGHVss_{—} | | | PC; Y712I; | | (also | |
| deltaG_DS.SOSL.GS_{—} | | | H66A; T316W | | labeled | |
| I535M.PC_D167N_{—} | | | | | as ‘L’) | |
| Y712I_H66A_T316W_{—} | | | | | | |
| gp150.750 | | | | | | |
| HV1303352, HIV_{—} | Protein | Membrane | F14; RnS; | IGHVss | Glycine- | Truncated |
| CAP256SU_UCA_OPT_{—} | | anchored | 3mut; 2G; | | Serine | beyond HXB2 |
| 4.0F14(A204V_V208L_{—} | | | deltaG; DS; | | linker #1 | position 750 |
| V68I_V255L)_{—} | | | SOSL; GS; | | (also | |
| RnS3mut2G_IGHVss_{—} | | | I535M; PC; | | labeled | |
| deltaG_DS.SOSL.GS_{—} | | | Y712I; H66A; | | as ‘L’) | |
| I535M.PC_D167N_{—} | | | T316W | | | |
| Y712I_H66A_T316W_{—} | | | | | | |
| gp150.750 | | | | | | |
| HV1303353, HIV_{—} | Protein | Membrane | F14; deltaG; | BPrlss | Glycine- | Wildtype |
| CAP256SU_UCA_OPT_4.0 | | anchored | SOSL; GS; | | Serine | |
| F14(A204V_V208L_{—} | | | I535M; | | linker #1 | |
| V68I_V255L)_gp160_{—} | | | Y712I | | (also | |
| BPrlss_deltaG_{—} | | | | | labeled | |
| SOSL.GS_I535M_D167N_{—} | | | | | as ‘L’) | |
| Y712I | | | | | | |
| HV1303354, HIV_{—} | Protein | Membrane | F14; deltaG; | BPrlss | Glycine- | Truncated |
| CAP256SU_UCA_OPT_4.0 | | anchored | SOSL; GS; | | Serine | beyond HXB2 |
| F14(A204V_V208L_{—} | | | I535M | | linker #1 | position 712 |
| V68I_V255L)_BPrlss_{—} | | | | | (also | |
| deltaG_SOSL.GS_{—} | | | | | labeled | |
| I535M_D167N_gp145.712 | | | | | as ‘L’) | |
| HV1303355, HIV_{—} | Protein | Membrane | F14; deltaG; | BPrlss | Glycine- | Truncated |
| CAP256SU_UCA_OPT_4.0 | | anchored | SOSL; GS; | | Serine | beyond HXB2 |
| F14(A204V_V208L_{—} | | | I535M; Y712I | | linker #1 | position 755 |
| V68I_V255L)_BPrlss_{—} | | | | | (also | |
| deltaG_SOSL.GS_{—} | | | | | labeled | |
| I535M_D167N_Y712I_{—} | | | | | as ‘L’) | |
| gp150.755 | | | | | | |
| HV1303356, HIV_{—} | Protein | Membrane | F14; deltaG; | BPrlss | Glycine- | Truncated |
| CAP256SU_UCA_OPT_4.0 | | anchored | SOSL; GS; | | Serine | beyond HXB2 |
| F14(A204V_V208L_{—} | | | I535M; Y712I | | linker #1 | position 750 |
| V68I_V255L)_BPrlss_{—} | | | | | (also | |
| deltaG_SOSL.GS_{—} | | | | | labeled | |
| I535M_D167N_Y712I_{—} | | | | | as ‘L’) | |
| gp150.750 | | | | | | |
| HV1303357, HIV_{—} | Protein | Membrane | F14; deltaG; | BPrlss | Glycine- | Wildtype |
| CAP256SU_UCA_OPT_4.0 | | anchored | DS; SOSL; | | Serine | |
| F14(A204V_V208L_{—} | | | GS; I535M; | | linker #1 | |
| V68I_V255L)_gp160_{—} | | | Y712I; | | (also | |
| BPrlss_deltaG_{—} | | | LL855/6AA | | labeled | |
| DS.SOSL.GS_I535M_{—} | | | | | as ‘L’) | |
| D167N_Y712I_LL855/ | | | | | | |
| 6AA | | | | | | |
| HV1303358, HIV_{—} | Protein | Membrane | F14; RnS; | BPrlss | Glycine- | Wildtype |
| CAP256SU_UCA_OPT_4.0 | | anchored | 3mut; 2G; | | Serine | |
| F14(A204V_V208L_{—} | | | deltaG; DS; | | linker #1 | |
| V68I_V255L)_RnS3mut2G_{—} | | | SOSL; GS; | | (also | |
| gp160_BPrlss_deltaG_{—} | | | I535M; Y712I, | | labeled | |
| DS.SOSL.GS_I535M_D167N_{—} | | | LL855/6AA | | as ‘L’) | |
| Y712I_LL855/6AA | | | | | | |
| HV1303359, HIV_{—} | Protein | Membrane | F14; deltaG; | BPrlss | Glycine- | Wildtype |
| CAP256SU_UCA_OPT_4.0 | | anchored | DS; SOSL; | | Serine | |
| F14(A204V_V208L_{—} | | | GS; I535M; | | linker #1 | |
| V68I_V255L)_gp160_{—} | | | PC; Y712I; | | (also | |
| BPrlss_deltaG_{—} | | | H66A; T316W; | | labeled | |
| DS.SOSL.GS_I535M.PC_{—} | | | LL855/6AA | | as ‘L’) | |
| D167N_Y712I_H66A_{—} | | | | | | |
| T316W_LL855/6AA | | | | | | |
| HV1303360, HIV_{—} | Protein | Membrane | F14; RnS; | BPrlss | Glycine- | Wildtype |
| CAP256SU_UCA_OPT_{—} | | anchored | 3mut; 2G; | | Serine | |
| 4.0F14(A204V_V208L_{—} | | | deltaG; DS; | | linker #1 | |
| V68I_V255L)_{—} | | | SOSL; GS; | | (also | |
| RnS3mut2G_gp160_{—} | | | I535M; PC; | | labeled | |
| BPrlss_deltaG_{—} | | | Y712I; H66A; | | as ‘L’) | |
| DS.SOSL.GS_I535M.PC_{—} | | | T316W; | | | |
| D167N_Y712I_H66A_{—} | | | LL855/6AA | | | |
| T316W_LL855/6AA | | | | | | |
| HV1303361, HIV_{—} | Protein | Membrane | F14; deltaG; | BPrlss | Glycine- | Truncated |
| CAP256SU_UCA_OPT_4.0 | | anchored | DS; SOSL; | | Serine | beyond HXB2 |
| F14(A204V_V208L_{—} | | | GS; I535M | | linker #1 | position 712 |
| V68I_V255L)_BPrlss_{—} | | | | | (also | |
| deltaG_DS.SOSL.GS_{—} | | | | | labeled | |
| I535M_D167N_gp145.712 | | | | | as ‘L’) | |
| HV1303362, HIV_{—} | Protein | Membrane | F14; RnS; | BPrlss | Glycine- | Truncated |
| CAP256SU_UCA_OPT_4.0 | | anchored | 3mut; 2G; | | Serine | beyond HXB2 |
| F14(A204V_V208L_{—} | | | deltaG; DS; | | linker #1 | position 712 |
| V68I_V255L)_RnS3mut2G_{—} | | | SOSL; GS; | | (also | |
| BPrlss_deltaG_{—} | | | I535M | | labeled | |
| DS.SOSL.GS_I535M_{—} | | | | | as ‘L’) | |
| D167N_gp145.712 | | | | | | |
| HV1303363, HIV_{—} | Protein | Membrane | F14; deltaG; | BPrlss | Glycine- | Truncated |
| CAP256SU_UCA_OPT_4.0 | | anchored | DS; SOSL; | | Serine | beyond HXB2 |
| F14(A204V_V208L_{—} | | | GS; I535M; | | linker #1 | position 712 |
| V68I_V255L)_BPrlss_{—} | | | PC; H66A; | | (also | |
| deltaG_DS.SOSL.GS_{—} | | | T316W | | labeled | |
| I535M.PC.H66A_T316W_{—} | | | | | as ‘L’) | |
| D167N_gp145.712 | | | | | | |
| HV1303364, HIV_{—} | Protein | Membrane | F14; RnS; | BPrlss | Glycine- | Truncated |
| CAP256SU_UCA_OPT_{—} | | anchored | 3mut; 2G; | | Serine | beyond HXB2 |
| 4.0F14(A204V_V208L_{—} | | | deltaG; DS; | | linker #1 | position 712 |
| V68I_V255L)_{—} | | | SOSL; GS; | | (also | |
| RnS3mut2G_BPrlss_{—} | | | I535M; PC; | | labeled | |
| deltaG_DS.SOSL.GS_{—} | | | H66A; T316W | | as ‘L’) | |
| I535M.PC.H66A_T316W_{—} | | | | | | |
| D167N_gp145.712 | | | | | | |
| HV1303365, HIV_{—} | Protein | Membrane | F14; deltaG; | BPrlss | Glycine- | Truncated |
| CAP256SU_UCA_OPT_4.0 | | anchored | DS; SOSL; | | Serine | beyond HXB2 |
| F14(A204V_V208L_{—} | | | GS; I535M; | | linker #1 | position 755 |
| V68I_V255L)_BPrlss_{—} | | | Y712I | | (also | |
| deltaG_DS.SOSL.GS_{—} | | | | | labeled | |
| I535M_D167N_Y712I_{—} | | | | | as ‘L’) | |
| gp150.755 | | | | | | |
| HV1303366, HIV_{—} | Protein | Membrane | F14; RnS; | BPrlss | Glycine- | Truncated |
| CAP256SU_UCA_OPT_4.0 | | anchored | 3mut; 2G; | | Serine | beyond HXB2 |
| F14(A204V_V208L_{—} | | | deltaG; DS; | | linker #1 | position 755 |
| V68I_V255L)_RnS3mut2G_{—} | | | SOSL; GS; | | (also | |
| BPrlss_deltaG_{—} | | | I535M; Y712I | | labeled | |
| DS.SOSL.GS_I535M_{—} | | | | | as ‘L’) | |
| D167N_Y712I_gp150.755 | | | | | | |
| HV1303367, HIV_{—} | Protein | Membrane | F14; deltaG; | BPrlss | Glycine- | Truncated |
| CAP256SU_UCA_OPT_4.0 | | anchored | DS; SOSL; | | Serine | beyond HXB2 |
| F14(A204V_V208L_{—} | | | GS; I535M; | | linker #1 | position 755 |
| V68I_V255L)_BPrlss_{—} | | | PC; Y712I; | | (also | |
| deltaG_DS.SOSL.GS_{—} | | | H66A; T316W | | labeled | |
| I535M.PC_D167N_Y712I_{—} | | | | | as ‘L’) | |
| H66A_T316W_gp150.755 | | | | | | |
| HV1303368, HIV_{—} | Protein | Membrane | F14; RnS; | BPrlss | Glycine- | Truncated |
| CAP256SU_UCA_OPT_{—} | | anchored | 3mut; 2G; | | Serine | beyond HXB2 |
| 4.0F14(A204V_V208L_{—} | | | deltaG; DS; | | linker #1 | position 755 |
| V68I_V255L)_{—} | | | SOSL; GS; | | (also | |
| RnS3mut2G_BPrlss_{—} | | | I535M; PC; | | labeled | |
| deltaG_DS.SOSL.GS_{—} | | | Y712I; H66A; | | as ‘L’) | |
| I535M.PC_D167N_{—} | | | T316W | | | |
| Y712I_H66A_T316W_{—} | | | | | | |
| gp150.755 | | | | | | |
| HV1303369, HIV_{—} | Protein | Membrane | F14; deltaG; | BPrlss | Glycine- | Truncated |
| CAP256SU_UCA_OPT_4.0 | | anchored | DS; SOSL; | | Serine | beyond HXB2 |
| F14(A204V_V208L_{—} | | | GS; I535M; | | linker #1 | position 750 |
| V68I_V255L)_BPrlss_{—} | | | Y712I | | (also | |
| deltaG_DS.SOSL.GS_{—} | | | | | labeled | |
| I535M_D167N_Y712I_{—} | | | | | as ‘L’) | |
| gp150.750 | | | | | | |
| HV1303370, HIV_{—} | Protein | Membrane | F14; RnS; | BPrlss | Glycine- | Truncated |
| CAP256SU_UCA_OPT_4.0 | | anchored | 3mut; 2G; | | Serine | beyond HXB2 |
| F14(A204V_V208L_{—} | | | deltaG; DS; | | linker #1 | position 750 |
| V68I_V255L)_RnS3mut2G_{—} | | | SOSL; GS; | | (also | |
| BPrlss_deltaG_{—} | | | I535M; Y712I | | labeled | |
| DS.SOSL.GS_I535M_{—} | | | | | as ‘L’) | |
| D167N_Y712I_gp150.750 | | | | | | |
| HV1303371, HIV_{—} | Protein | Membrane | F14; deltaG; | BPrlss | Glycine- | Truncated |
| CAP256SU_UCA_OPT_4.0 | | anchored | DS; SOSL; | | Serine | beyond HXB2 |
| F14(A204V_V208L_{—} | | | GS; I535M; | | linker #1 | position 750 |
| V68I_V255L)_BPrlss_{—} | | | PC; Y712I; | | (also | |
| deltaG_DS.SOSL.GS_{—} | | | H66A; T316W | | labeled | |
| I535M.PC_D167N_Y712I_{—} | | | | | as ‘L’) | |
| H66A_T316W_gp150.750 | | | | | | |
| HV1303372, HIV_{—} | Protein | Membrane | F14; RnS; | BPrlss | Glycine- | Truncated |
| CAP256SU_UCA_OPT_{—} | | anchored | 3mut; 2G; | | Serine | beyond HXB2 |
| 4.0F14(A204V_V208L_{—} | | | deltaG; DS; | | linker #1 | position 750 |
| V68I_V255L)_{—} | | | SOSL; GS; | | (also | |
| RnS3mut2G_BPrlss_{—} | | | I535M; PC; | | labeled | |
| deltaG_DS.SOSL.GS_{—} | | | Y712I; H66A; | | as ‘L’) | |
| I535M.PC_D167N_{—} | | | T316W | | | |
| Y712I_H66A_T316W_{—} | | | | | | |
| gp150.750 | | | | | | |
| HV1303373, HIV_{—} | Protein | Membrane | F14; RnS; | BPrlss | Glycine- | Wildtype |
| CAP256SU_UCA_OPT_4.0 | | anchored | 3mut; 2G; | | Serine | |
| F14(A204V_V208L_{—} | | | deltaG; DS; | | linker #1 | |
| V68I_V255L)_RnS3mut2G_{—} | | | SOSL; GS; | | (also | |
| gp160_BPrlss_deltaG_{—} | | | I535M; Y712I; | | labeled | |
| DS.SOSL.GS_I535M_{—} | | | LL855/6AA | | as ‘L’) | |
| Y712I_LL855/6AA | | | | | | |
| HV1303374, HIV_{—} | Protein | Membrane | F14; deltaG; | BPrlss | Glycine- | Wildtype |
| CAP256SU_UCA_OPT_4.0 | | anchored | DS; SOSL; | | Serine | |
| F14(A204V_V208L_{—} | | | GS; I535M; | | linker #1 | |
| V68I_V255L)_gp160_{—} | | | PC; Y712I; | | (also | |
| BPrlss_deltaG_{—} | | | H66A; T316W; | | labeled | |
| DS.SOSL.GS_I535M.PC._{—} | | | LL855/6AA | | as ‘L’) | |
| Y712I_H66A_T316W_{—} | | | | | | |
| LL855/6AA | | | | | | |
| HV1303375, HIV_{—} | Protein | Membrane | F14; RnS; | BPrlss | Glycine- | Wildtype |
| CAP256SU_UCA_OPT_{—} | | anchored | 3mut; 2G; | | Serine | |
| 4.0F14(A204V_V208L_{—} | | | deltaG; DS; | | linker #1 | |
| V68I_V255L)_{—} | | | SOSL; GS; | | (also | |
| RnS3mut2G_gp160_{—} | | | I535M; PC; | | labeled | |
| BPrlss_deltaG_{—} | | | Y712I; H66A; | | as ‘L’) | |
| DS.SOSL.GS_I535M.PC._{—} | | | T316W; | | | |
| Y712I_H66A_T316W_{—} | | | LL855/6AA | | | |
| LL855/6AA | | | | | | |
| HV1303376, HIV_{—} | Protein | Membrane | F14; deltaG; | BPrlss | Glycine- | Truncated |
| CAP256SU_UCA_OPT_4.0 | | anchored | DS; SOSL; | | Serine | beyond HXB2 |
| F14(A204V_V208L_{—} | | | GS; I535M | | linker #1 | position 712 |
| V68I_V255L)_BPrlss_{—} | | | | | (also | |
| deltaG_DS.SOSL.GS_{—} | | | | | labeled | |
| I535M_gp145.712 | | | | | as ‘L’) | |
| HV1303377, HIV_{—} | Protein | Membrane | F14; RnS; | BPrlss | Glycine- | Truncated |
| CAP256SU_UCA_OPT_4.0 | | anchored | 3mut; 2G; | | Serine | beyond HXB2 |
| F14(A204V_V208L_{—} | | | deltaG; DS; | | linker #1 | position 712 |
| V68I_V255L)_RnS3mut2G_{—} | | | SOSL; GS; | | (also | |
| BPrlss_deltaG_{—} | | | I535M | | labeled | |
| DS.SOSL.GS_I535M_{—} | | | | | as ‘L’) | |
| gp145.712 | | | | | | |
| HV1303378, HIV_{—} | Protein | Membrane | F14; deltaG; | BPrlss | Glycine- | Truncated |
| CAP256SU_UCA_OPT_4.0 | | anchored | DS; SOSL; | | Serine | beyond HXB2 |
| F14(A204V_V208L_{—} | | | GS; I535M; | | linker #1 | position 712 |
| V68I_V255L)_BPrlss_{—} | | | PC; H66A; | | (also | |
| deltaG_DS.SOSL.GS_{—} | | | T316W | | labeled | |
| I535M.PC.H66A_{—} | | | | | as ‘L’) | |
| T316W_gp145.712 | | | | | | |
| HV1303379, HIV_{—} | Protein | Membrane | F14; RnS; | BPrlss | Glycine- | Truncated |
| CAP256SU_UCA_OPT_{—} | | anchored | 3mut; 2G; | | Serine | beyond HXB2 |
| 4.0F14(A204V_V208L_{—} | | | deltaG; DS; | | linker #1 | position 712 |
| V68I_V255L)_{—} | | | SOSL; GS; | | (also | |
| RnS3mut2G_BPrlss_{—} | | | I535M; PC; | | labeled | |
| deltaG_DS.SOSL.GS_{—} | | | H66A; T316W | | as ‘L’) | |
| I535M.PC.H66A_{—} | | | | | | |
| T316W_gp145.712 | | | | | | |
| HV1303380, HIV_{—} | Protein | Membrane | F14; deltaG; | BPrlss | Glycine- | Truncated |
| CAP256SU_UCA_OPT_4.0 | | anchored | DS; SOSL; | | Serine | beyond HXB2 |
| F14(A204V_V208L_{—} | | | GS; I535M; | | linker #1 | position 755 |
| V68I_V255L)_BPrlss_{—} | | | Y712I | | (also | |
| deltaG_DS.SOSL.GS_{—} | | | | | labeled | |
| I535M_Y712I_gp150.755 | | | | | as ‘L’) | |
| HV1303381, HIV_{—} | Protein | Membrane | F14; RnS; | BPrlss | Glycine- | Truncated |
| CAP256SU_UCA_OPT_4.0 | | anchored | 3mut; 2G; | | Serine | beyond HXB2 |
| F14(A204V_V208L_{—} | | | deltaG; DS; | | linker #1 | position 755 |
| V68I_V255L)_RnS3mut2G_{—} | | | SOSL; GS; | | (also | |
| BPrlss_deltaG_{—} | | | I535M; Y712I | | labeled | |
| DS.SOSL.GS_I535M_{—} | | | | | as ‘L’) | |
| Y712I_gp150.755 | | | | | | |
| HV1303382, HIV_{—} | Protein | Membrane | F14; deltaG; | BPrlss | Glycine- | Truncated |
| CAP256SU_UCA_OPT_4.0 | | anchored | DS; SOSL; | | Serine | beyond HXB2 |
| F14(A204V_V208L_{—} | | | GS; I535M; | | linker #1 | position 755 |
| V68I_V255L)_BPrlss_{—} | | | PC; Y712I; | | (also | |
| deltaG_DS.SOSL.GS_{—} | | | H66A; T316W | | labeled | |
| I535M.PC._Y712I_{—} | | | | | as ‘L’) | |
| H66A_T316W_gp150.755 | | | | | | |
| HV1303383, HIV_{—} | Protein | Membrane | F14; RnS; | BPrlss | Glycine- | Truncated |
| CAP256SU_UCA_OPT_{—} | | anchored | 3mut; 2G; | | Serine | beyond HXB2 |
| 4.0F14(A204V_V208L_{—} | | | deltaG; DS; | | linker #1 | position 755 |
| V68I_V255L)_{—} | | | SOSL; GS; | | (also | |
| RnS3mut2G_BPrlss_{—} | | | I535M; PC; | | labeled | |
| deltaG_DS.SOSL.GS_{—} | | | Y712I; H66A; | | as ‘L’) | |
| I535M.PC._Y712I_{—} | | | T316W | | | |
| H66A_T316W_gp150.755 | | | | | | |
| HV1303384, HIV_{—} | Protein | Membrane | F14; deltaG; | BPrlss | Glycine- | Truncated |
| CAP256SU_UCA_OPT_4.0 | | anchored | DS; SOSL; | | Serine | beyond HXB2 |
| F14(A204V_V208L_{—} | | | GS; I535M; | | linker #1 | position 750 |
| V68I_V255L)_BPrlss_{—} | | | Y712I | | (also | |
| deltaG_DS.SOSL.GS_{—} | | | | | labeled | |
| I535M_Y712I_gp150.750 | | | | | as ‘L’) | |
| HV1303385, HIV_{—} | Protein | Membrane | F14; RnS; | BPrlss | Glycine- | Truncated |
| CAP256SU_UCA_OPT_4.0 | | anchored | 3mut; 2G; | | Serine | beyond HXB2 |
| F14(A204V_V208L_{—} | | | deltaG; DS; | | linker #1 | position 750 |
| V68I_V255L)_RnS3mut2G_{—} | | | SOSL; GS; | | (also | |
| BPrlss_deltaG_{—} | | | I535M; Y712I | | labeled | |
| DS.SOSL.GS_I535M_{—} | | | | | as ‘L’) | |
| Y712I_gp150.750 | | | | | | |
| HV1303386, HIV_{—} | Protein | Membrane | F14; deltaG; | BPrlss | Glycine- | Truncated |
| CAP256SU_UCA_OPT_4.0 | | anchored | DS; SOSL; | | Serine | beyond HXB2 |
| F14(A204V_V208L_{—} | | | GS; I535M; | | linker #1 | position 750 |
| V68I_V255L)_BPrlss_{—} | | | PC; Y712I; | | (also | |
| deltaG_DS.SOSL.GS_{—} | | | H66A; T316W | | labeled | |
| I535M.PC._Y712I_{—} | | | | | as ‘L’) | |
| H66A_T316W_gp150.750 | | | | | | |

[0173] Modifications disclosed include (all positions are based on HXB2 numbering):
[0174] Y712I includes a Y712I substitution. Without being bound by theory, this modification increase expression of Env on cell surface. See Labranche et al. J. Virol. 69 (9): 5217-5227 (1995).
[0175] Sodroski includes substitutions H66A, A582T, and L587A. Without being bound by theory, this modification prevents CD4-induced conformations. See Pacheco et al. J Virol. 91 (5): e02219-16 (2017).
[0176] F14 includes substitutions A204V, V208L, V681, and V255L. Without being bound by theory, this modification prevents CD4-induced conformations. See Henderson et al. Nat Commun. 11:520 (2020).
[0177] SOSIP includes substitutions A501C, T605C, and 1559P. Without being bound by theory, this modification stabilizes prefusion conformation. See Sanders et al. J. Virol. 76, 8875-8889 (2002).
[0178] SOS includes substitutions A501C and T605C. Without being bound by theory, this modification stabilizes prefusion conformation, See Sanders et al. J. Virol. 76, 8875-8889 (2002).
[0179] DS includes substitutions I201C and A433C. Without being bound by theory, this modification fixes prefusion conformation. See Kwon et al. Nat Struct Mol Biol 22:522-531 (2015).
[0180] 3mut includes substitutions N302M, T320L, and A329P. Without being bound by theory, this modification stabilizes trimer apex, improve thermostability. See Chuang, G-Y et al. J Virol 94: e00074-20 (2020)
[0181] 2G includes substitutions D636G and T569G. Without being bound by theory, this modification prevents postfusion gp41 helical transition. See Guenaga J., et al. Immunity 46 (5): 792-803.e3 (2017).
[0182] RnS includes substitutions E442N, S437P, A2041, 1573F, K588E, D589V, Y609P, K651F, S6551, and 1535N. It replaces rare and/or destabilizing mutations from wildtype Env. (Specific to CAP256wk34.80 Env, but we also used for CAP256SU based on its high similarity to the former. Due to conflict with F14 mutation A204V, when RnS are combined with F14, the A204V in F14 was used.). See Gorman J., et al. Cell Reports 31 (1): 107488 (2020).
[0183] Signal Peptide #1 replaces wildtype signal peptide with MAISGVPVLGFFIIAVLMSAQESWA. Without being bound by theory, this modification improves expression of mRNA constructs.
[0184] Glycine-Serine linker #1 replace 508-REKR-511 with GGGGSGGGGS, a flexible linker between gp120 & gp41 to replace furin cleavage. Also referred to as modification “L”. See Sharma S.K., et al. Cell Reports 11 (4): 539-550 (2015).
[0185] RRRRRR replaces 508-REKR-511 with RRRRRR and replaces native furin cleavage site with a modified furin cleavage sequence between gp120 & gp41. Without being bound by theory, this modification increases cleavage frequency. Also referred to as modification “6R or R6”. See Ringe R P et al. Proc Natl Acad Sci USA. 2013 Nov. 5; 110 (45): 18256-61.
[0186] SIVMac CT replaces wildtype cytoplasmic tail (HXB2 713-854) with truncated SIVMac cytoplasmic tail RPVFSSPPSYFQ. Without being bound by theory, this modification improves expression of Env on cell-surface when expressed by mRNA immunogens. See Postler T. S., Desrosiers R. C. J. Virol. 87 (1): 2-15 (2013).
[0187] GS replaces sequence from HXB2 546-568 with GSAGSAGSGSAGSGSAGSGSAGS and replaces the unstable portion (23 amino acids) of envelope heptad repeat 1 with a flexible linker of equivalent size. See Saunders et al. Unpublished.
[0188] T316W includes substitution T316W. Without being bound by theory, this modification includes hydrophobic amino acid in the V3 loop to facilitate packing of the V3 loop and prevent unwanted exposure. See de Taeye S W, Ozorowski G, Torrents de la Peña A, et al. Cell. 2015; 163 (7): 1702-1715.
[0189] I535M includes substitution IS35M. Without being bound by theory, this modification stabilizes of the interprotomer contacts in gp41. See de Taeye SW, Ozorowski G, Torrents de la Peña A, et al. Cell. 2015; 163 (7): 1702-1715.
[0190] deltaG deletes HIV-1 envelope Glycine at position 29. Without being bound by theory, this modification presumes Glycine 29 to be the final amino acid in the signal peptide. Glycine 29 is removed when an artificial signal sequence is added. See Saunders et al. Unpublished.
[0191] LL855/6AA includes substitutions L855A and L856A. Without being bound by theory, this modification is a mutation of a conserved dileucine motif that mediates endocytosis of HIV-1 envelope. Without being bound by theory, when combined with Y712I boosts surface expression of HIV-1 envelope. See Byland R et al. Mol Biol Cell. 2007 February; 18 (2): 414-25
[0192] IGHVss replace wildtype signal peptide with MGWSCIILFLVATATGVHA, a mouse immunoglobulin heavy chain variable region signal sequence. Without being bound by theory, this modification enhances protein secretion from cells. UniProtKB/Swiss-Prot Accession Number P01750. Also referred as “mIgss”. See Cheng K W et al. Biochem J. 2021; 478 (12): 2309-2319.
[0193] BPriss replaces wildtype signal peptide with MDSKGSSQKGSRLLLLLVVSNLLLPQGVLA, a bovine prolactin signal sequence. Without being bound by theory, this modification enhances protein secretion from cells. See Saunders et al. Unpublished.
[0194] PC includes substitutions S655K and K658Q. Without being bound by theory, this modification includes contact amino acids between envelope protomers. Without being bound by theory, this modification stabilizes sequence found in BG505. Protomer contacts are referred to as “PC”. See Saunders et al. Unpublished.
[0195] H66A includes substitution H66A. Without being bound by theory, substitution in gp120 that modulates the transition from the unliganded conformation of envelope to the CD4-bound state. See Pacheco B, et al. J Virol. 2017; 91 (5): e02219-16.
[0196] 2560_pUC-ccTEV-A101 5′UTR includes aGcATAAAAGTCTCAACACAACATATACAAAACAAACGAATCTCAAGCAA TCAAGCATTCTACTTCTATTGCAGCAATTTAAATCATTTCTTTTAAAGCAA AAGCAATTTTCTGAAAATTTTCACCATTTACGAACGATAGCGCT. Without being bound by theory, this modification is an improved 5′ UTR sequence for mRNA stability and half-life from screens. See Mohamad-Gabriel Alamch, Drew Weissman et al.
[0197] 2560_pUC-ccTEV-A101 3′UTR includes actagtAGTGACTGACTAGGATCTGGTTACCACTAAACCAGCCTCAAGAACAC CCGAATGGAGTCTCTAAGCTACATAATACCAACTTACACTTACAAAATGTT GTCCCCCAAAATGTAGCCATTCGTATCTGCTCCTAATAAAAAGAAAGTTTC TTCACATTCT. Without being bound by theory, this modification is an improved 5′ UTR sequence for mRNA stability and half-life from screens. See Mohamad-Gabriel Alameh, Drew Weissman et al.
[0198] poly A (immediately after 3′UTR) includes AAAAAAAAAAAAAAAAAAAAAAAAAAAAAAAAAAAAAAAAAAAAA AAAAAAAAAAAAAAAAAAAAAAAAAAAAAAAAAAAAAAAAAAAAAAA AAAAAAA. Without being bound by theory, this modification is an improved polyA tail sequence for mRNA stability and half-life. See Jalkanen et al. Semin Cell Dev Biol. 34:24-32 (2014).
[0199] mRNA codon optimization includes a reverse translation of protein amino acid sequence to optimal codons. Without being bound by theory, this modification codon optimization is performed as follow: amino acid sequence is reverse translated into an DNA sequence using a modified mammalian codon usage table. The table increases both the CIA and the GC content of the mRNA. The reverse translated sequence (or mRNA sequence) is modeled into mFold and Delta H/Delta G computed, and the sequence with the lowest free energy is selected. In some cases, the codons can be replaced in specific locations to relax the tridimentional structure of the optimized mRNA. The sequence is then cloned between the 5′UTR and 3′UTR above. See Leppek et al. Nature Communications 13:1536 (2022).

[0200] The exemplary constructs provided herein, see e.g., Table 4, include various combinations of these envelope modifications. Any modification or combination of the modifications described herein, including but not limited, to different versions of soluble proteins, different versions of membrane expressed proteins, stabilization mutations, furin cleavage site mutations, signal peptides, and/or cytoplasmic tail modifications can be applied to any full-length envelopes sequence. For example, one or more of the modifications described herein can be applied to envelope CAM13RRK, CAM13RRRK, HIV_CAP256SU_UCA_OPT_4.0, CAP256SU_UCA_OPT_4.0 375S, CAP256SU_UCA_OPT_4.0 Y375S_D167N, CAP256 wk34.80_V2UCA_OPT, CAP256 wk34.80 PCT64UCA_OPT, CAP256_wk34.80_V2UCA_OPT_R17IK, CAP256 wk34.80 V2UCA_OPT_RRK, CAP256_wk34.80_V2UCA_OPT_RRK_D167N, Q23.17 (natural_wildtype), Q23.17_V2UCAOPT, Q23.17_V2UCAOPT_GLY, Q23.17_V2UCAOPT_ALT, Q23.17_V2UCAOPT_GLY_ALT, Q23.17_V2UCAOPT_GLY_ALT_R170Q, CH505_V2UCAOPT2_N332, CH505_V2UCAOPT_v3.0.

[0201] In some embodiments, envelope CAM13RRK, CAM13RRRK, HIV_CAP256SU_UCA_OPT_4.0, CAP256SU_UCA_OPT_4.0 375S, CAP256SU_UCA_OPT_4.0_Y375S_D167N, CAP256_wk34.80_V2UCA_OPT, CAP256 wk34.80 PCT64UCA_OPT, CAP256 wk34.80_V2UCA_OPT_R17IK, CAP256_wk34.80 V2UCA_OPT_RRK, CAP256_wk34.80_V2UCA_OPT_RRK_D167N, Q23.17_(natural_wildtype), Q23.17_V2UCAOPT, Q23.17_V2UCAOPT_GLY, Q23.17_V2UCAOPT_ALT, Q23.17_V2UCAOPT_GLY_ALT, Q23.17 V2UCAOPT_GLY_ALT_R170Q, CH505_V2UCAOPT2 N332, CH505_V2UCAOPT_v3.0 comprises one or more of modifications Y712I, Sodroski substitutions, F14 substitutions, SOSIP substitutions, SOS substitutions, DS substitutions, PP substitutions, 3mut substitutions, 2G substitutions, RnS substitutions, Signal Peptide #1, Glysine-Serine linker #1, RRRRRR, SIVMacCT, GS, T316W, 1535M, deltaG, LL855/6AA, IGHVss, BPriss, PC substitutions, or H66A.

[0202] The invention is described in the following non-limiting examples.

### EXAMPLES

### Example 1

[0203] Saunders et al. have reported that vaccination with stabilized CH505 SOSIP trimers elicits VIV2-glycan bnAbs. See Cell Rep. 2017 Dec. 26; 21 (13): 3681-3690, incorporated by reference in its entirety.

### Example 2

[0204] CH505-BG505 Chimeric SOSIP Redesign for V2 UCA Constructs & for V5 glycan mutants

[0205] Chimeric v4 6R SOSIP constructs have BG505 gp41 and end at HXB2 664. Thus, the SOSIP constructs have sub-optimal amino acids at some of our mature and UCA signature sites in gp41.

[0206] Since the region encompassed by the SOSIP constructs ends at 664, the UCA_OPT1 SOSIP and OPT2 SOSIP constructs are the same. Same for UCA_OPT1 N332 and UCA OPT2 N332 SOSIPs. So, skip testing the OPT2 SOSIP constructs.

[0207] Instead, we suggest testing two other constructs: with and without gp41 optimized mutations in the backbones of UCA_OPT1 and UCA_OPT1 N332—these are UCA_OPT1 gp41mut and UCA_OPT1 N332 gp41mut.

[0208] The gp41mut constructs introduce favorable amino acids at 3 sites: 588 and 644 (signature sites for mature V2 apex bNAbs) and 535 (PG9 germline reverted signature).

[0209] List of SOSIP constructs for testing:
[0210] CH50STF_V2.SET.OPT_ch.SOSIPv4.1
[0211] CH505TF_V2.SET.OPT.N332_ch.SOSIPv4.1
[0212] CH505TF_V2.UCA.OPT1_ch.SOSIPv4.1
[0213] CH505TF_V2.UCA.OPT1.N332 ch.SOSIP.v4.1

[0214] But we propose testing the following two instead of the UCA_OPT2 constructs (since they are same as UCA_OPT1 for the SOSIP constructs);
[0215] CH50STF_V2.UCA.OPT1.gp41mut_ch.SOSIP.v4.1
[0216] CH50STF_V2.UCA.OPT1.N332.gp41mut_ch.SOSIP.v4.1

[0217] The gp4 Imut constructs have 3 mutations in gp41: R->K at position 588; G->R at position 644; M->I at position 535.

[0218] Additional optimized sequences are shown in FIG. 4C, 12F, 13, 14, 16, 17, and 18F, and characterization in FIGS. 6A and 6B and 8-12, 15, and 18. Additional SOSIPs sequences are shown in FIGS. 13, 14, and 17.

### Example 3 Animal Studies

[0219] In non-limiting embodiment these immunogens can be used as either single primes and boosts in humanized mice or bnAb UCA or intermediate antibody VH+VL knockin mice, non-human primates (NHPs) or humans, or used in combinations in animal models or in humans.

[0220] Immunogens to initiate VIV2, and/or CD4 binding site and/or Fusion Peptide unmutated common ancestor (UCA) broadly neutralizing antibody (bnAbs) precursors. Non-limiting examples of immunizations are listed:
[0221] 1. Prime X 3 with either A, B, C, D, G or H (listed in FIGS. 3, 12F, 13, 14, 16, 17, or 18F, Table 1). In other embodiments, these immunogens could be in any suitable envelope form.
[0222] 2. Take the optimal prime for bnAbs and after priming, boost with A, B, C, D, G or H.
[0223] 3. Take the optimal prime for bnAbs, and after priming boost with a mixture of A, B, C, D. G or H.
[0224] 4. Prime X3 with the mixture of A, B, C, D, G and H and the boost with one of A, B, C D, D or H to focus the response on bnAb epitopes.
[0225] 5. Prime as in steps #1-4 above and then boost with the CH505 Transmitted/Founder (TF) gp140 SOSIP trimer that has induced autologous neutralizing antibodies against the CH505 tier 2 TF virus.
[0226] 6. Prime as in steps #1-4 above and then boost with the forms of the MT145 SIV Env (see e.g. Andrabi et al., 2019, Cell Reports27, 2426-244) or similar SIV envelope that has a VIV2 loop-glycan bnAb epitope that binds to VIV2-glycan UCAs and bnAbs.
[0227] 7. Prime as in steps #1-4 above and then boost with CM244, ZM233, WITO HIV-1 envelope or other WT Envs that have binding affinity for V1V2 bnAbs and their UCAs.

[0228] In non-limiting embodiments, these are administered as recombinant protein. Any suitable adjuvant could be use. In non-limiting embodiments, these are administered as nucleic acids, DNA and/or mRNAs. In non-limiting embodiments, the mRNAs are modified mRNAs administered as LNPs.

[0229] In non-limiting embodiments, the immunogens provide optimal prime for VIV2, and/or CD4 binding site, and/or Fusion Peptide precursors. In some embodiments, an optimal prime is determined by measurement of the frequency of bnAb precursors before immunization and after each immunization to determine if the immunization has expanded the desired bnAb B cell precursor pool. This can be performed by initial B cell repertoire analysis by single cell sorting of memory or germinal center B cells (e.g. Bonsignori et al. Sci Transl Med. 2017 Mar. 15; 9 (381): eaai7514.) and then followed by next generation sequencing of either lymph node, blood or other immune organ B cells to determine if the primed B cell bnAb clones were expanded and therefore boosted.

### Example 4

[0230] This example shows information and sequences of a second design round. This second round of designs resulted in gains in sensitivity to the CAP256 and PG9/PG16 UCAs.

[0231] Several signatures had been found for PG9 with only the heavy and/or light chain reverted. However, no PG9 UCA reactivity was identified. Thus, it was hypothesized that the single chain revered PG9 is not a good mimic of the PG9 UCA.

[0232] It was observed that 4 out of 177 viruses were neutralized for fully reverted PG9gHgL. Signatures were detected using the following criteria: (i) contact sites; (ii) p less than 0.05; and (iii) at least two sensitive viruses have the signature. Using these criteria, one signature was identified-Arginine 170 (i.e., Arg170 or R170). FIG. 7A. Arg170 is a polar contact with Tyr111. Lys170, however, is not a contact, as it is 4.2 Å away. PG9 UCA possesses Trp111, raising the question of whether this residue participates in cation-pi interactions with Arg170.

[0233] Mutations of K169 to arginine (K169R) resulted in enhanced PG16 RUA sensitivity of about 10-fold and double mutations at K169 and K170 (K169R and K170R) resulted in roughly a 50-fold sensitivity enhancement. There was a similar, though less pronounced improvement in PG9 with these mutations. Based on these results and signatures the following mutations were investigated: CH505 UCA_OPT+Q170R and CH505 UCA_OPT+Q170R+K169R. Results are depicted in FIG. 7B.

[0234] Previous designs relied on weak outside epitope signatures for CAP256 IA4 (breadth=3 of 202 viruses). The threshold signature was relaxed to A-161 sensitive for CAP256 IA4 & UCA. Structurally A-161 is at the base of 160 glycan, so it may impact glycan dynamics or processing. Experimental testing showed M161A did not gain CAP256 UCA sensitivity. FIG. 7C.

[0235] CH505 UCA_OPT2+N332 is weakly neutralized by PCT64 LMCA (IC50=105 ug/ml). Previous designs were most favorable for all PCT64 intermediate signatures except at 130. D-130 associated with sensitivity. H-130 was used as it was the only CH04 UCA sensitivity signature, and was not a significant signature for PCT64 intermediates. CH505 UCA_OPT+H130D was tested to determine the PCT64 LMCA signature. FIG. 7D.

[0236] Q170R improved sensitivity to PG16RUA and CH01 RUA. FIG. 7E. H130D improved sensitivity to PCT64 LMCA and reduced sensitivity to CH01 RUA. FIG. 7F. H130D+K169R+Q170R improved sensitivity to PG9 and PG16 RUAs. FIG. 7G. This was a surprising 100-fold improvement for PG16 RUA compared to the Q170R mutation.

[0237] The H130D+K169R+Q170R mutation displayed slight improvement over UCA OPT2 for CH01 UCA, but was slightly reduced compared to the Q170R mutation. H130D+K169R+Q170R sensitivity was slightly reduced for PCT64 LMCA compared to UCA OPT2. H130D sensitivity for PCT64 LMCA was also reduced, but neutralization was observed at 50% at about 100 μg/ml.

[0238] In summary, the redesign of UCA_OPT showed partial success. H130D improved sensitivity to PCT64 UCAs. Q170R and K169R improved PG9 and PG16 UCA sensitivity. Triple mutants can be potentially neutralized by CH01 and PG16 UCAs and may provide weak neutralization of PG9 and PCT64 UCAs. Leading candidates were tested for sensitivity and were found to be reactive to three out of five linage UCAs tested. FIG. 7H. This includes leading candidate CH505.V2UCAOPT.v2+H130D+K169R+Q170R (CH505.V2UCAOPT.v3). The initial round of signature based optimization of CH505 led to improved sensitivity to all V2 apex mature and gain of reactivity to UCAs of two lineages. This second round produced improvements by gaining reactivity to one more lineage's UCA.

[0239] Further development may include improving sensitivity to the three reactive lineage UCAs, developing SOSIP and/or mRNA expression and their associated immunization abilities, testing as SHIVs for accelerated V2 apex bNAb development, and co-optimizing for simultaneous targeting of CH235 and V2 apex UCAs.

[0240] Any one of these immunogens could be tested in any suitable animal study to determine immunogenicity of the envelopes.

### Example 5

[0241] This example shows information and sequences of a third design round. The design was directed towards a cocktail of pan V2 apex bNAb germline targeting envelopes.

[0242] Env signatures were used to design Envs that are sensitive to V2 apex bNAb UCA. The natural Envs CH505.TF, CAP256-SU, CAM13, T250 and Q23 were used as starting templates and improved upon. FIG. 8A shows the leading constructs that together as a cocktail are sensitive to all V2 apex UCAs. No single natural or optimized Env is sensitive to each V2 UCAs, so we want to use a cocktail of Envs for multiple V2 apex bNAb germline targeting. Other constructs are still being improved and tested. FIG. 8B. (CH505_UCA_OPT2 N332 H130D K169R K170R is also referred to as CH505_V2UCA_OPT_v3.0.)

[0243] Background: V2 apex bNAbs are an attractive target for immunogen design. FIG. 9A. V2 apex bNAbs arise frequently in HIV-1 infected humans (12-15%) and in SHIV infected RMs (11%). Low levels of somatic hypermutation are required (Wiehe et al Cell Host Microbe 23 (6): 759 (2018)). Low levels of poly- and autoreactivity are also preferred (Liu et al J Virol 89:784 (2015)). Long anionic CDRH3s (>24aa) encoded by germline. Precursors are rare, so germline targeting immunogens are critical. No natural Envs that can target multiple V2 apex bNAb lineages, therefor requiring immunogen design.

[0244] CH505 Envs can induce V2 apex (b) NAbs. CH505 TF can trigger germline a V2 apex UCA carrying B-cell line (CH01 UCA Ramos cells). One rhesus macaque (out of 4) immunized with CH505 Envs (gp140) developed tier-2 heterologous NAbs directed at the V2 apex. (Saunders et al Cell Rep 2017 21 (13) 3681-90). RM5695 infected with SHIV CH505 based quasispecies post vaccination developed V2 apex bNAbs. (Roark et al. Science 2020 371 (6525): eabd2638). FIG. 9B. Therefore, it is desired to design CH505 TF immunogens with improved antigenicity to mature and UCAs of V2 apex bNAbs.

[0245] Initial Design: A schematic of the signature based approach of immunogen design used is depicted in FIG. 9C. See also Bricault et al. Cell Host Microbe 2019 25 (1) 59-72. Signatures are amino acids or glycan motifs statistically associated with one group of viruses vs others. Previously, sequence patterns associated with sensitivity to mature V2 bNAbs had been identified (Bricault et al. Cell Host Microbe 2019 25 (1) 59-72). FIG. 1. These displayed phylogenetic and/or contact sites, robustness across bNAbs and datasets, and were used for designing CH505 SET OPT. FIG. 9D. Three classes of sites were considered for mutation to increase sensitivity: wildtype resistant (replace with sensitive amino acid or non-significant); wildtype non-significant (replace with sensitive amino acid if available); and wildtype sensitive, but multiple sensitivity signatures at site (replace with more sensitive amino acid if available). FIG. 9P. Additional design considerations included (i) frequency of mutant (M-group & clade C); (ii) number of V2 bNAbs include the signature; and (iii) strength of each signature. For example, NxST 130 may be mutated to H-13. NxST 130 displays strong resistance signature for several bNAbs. H is robust across V2 bNAbs and datasets (vs D) and is not infrequent. On the other hand, T-297 may be retained as there is no sensitivity signature or alternatives identified and T is the most common form. 11 mutations total were present in the final, initial design. FIG. 9Q. 8 resistant or non-significant with sensitive signatures were replaced. Additional mutations were one sensitive to more sensitive (R169K), one neutral to neutral (E170Q, remove-ve charge), one resistance signature for completing glycan shield (NxST332; no impact on sensitivity).

[0246] Neutralization data for 208 global viruses against CH04 & CAP256 UCAs, and heavy and/or light chain germline reverted PG9 was generated. (Gorman et al. NSMB 23 81-90 (2016)) FIG. 9E. Unlike other bNAb classes, V2 apex precursors can neutralize heterologous strains. CH04 UCA shows 4% breadth. PG9 with both heavy and light chain reverted provides 2% breadth. CAP256 UCA only neutralizes 1 autologous virus. Partial germline reverted PG9 (heavy or light) display a higher breadth. These data were used to calculate signatures.

[0247] Robust signature sites met at least 2 criteria: (a) contact site; (b) phylogenetically corrected signature; and/or (c) strong association (q<0.1). FIGS. 2, 7D. Few signatures for CH04 UCA, and PCT64 early bNAbs were identified. Several signatures for PG9 either heavy or light chain reverted were identified, due to their relatively higher breadth. UCA OPT_1 (CH505 TF UCA_OPT1) includes mature V2 apex signatures, with 5 additional for UCAs. FIG. 9R.

[0248] For CAP256 IA4, weak signatures were found due to low statistical power (3 out of 208 viruses neutralized). Only resistant signatures outside the epitope were identified. Change to neutral residues at most sites would involve mutation to rare amino acid and/or removing glycans that could introduce vulnerable gaps in the glycan shield. Only two mutations were introduced at positions 736 and 842. Designed UCA optimized constructs without (UCA_OPT1) and with (UCA_OPT2) these weak signatures. FIG. 9F.

[0249] Hypervariable loops cannot be aligned due to extreme length and sequence variation. Rather, tests are performed to identify associations with net charge, length and number of glycans. Two significant hypervariable loop associations with sensitivity to V2 apex bNAbs were identified: (a) positively charged V2 loops (V2 apex bNAbs have long anionic CDRH3); and (b) smaller hypervariable V1 & V2 combined (possible steric hindrance due to the dynamic loops). FIG. 9G-9I.

[0250] Mature signature introduction displays an increased sensitivity to neutralization by mature V2 bNAbs. Germline signatures displayed further increased sensitivity to neturalization by mature V2 bNAbs. FIG. 9J-9N. UCA signatures increased the sensitivity of CH505 to neutralization by both CH01 and the PCT64 V2 bNAb UCAs. FIG. 9K. V2 SET OPT also gains CH01 UCA sensitivity, likely due to H-130. UCA_OPT2 that had CAP256 VRC26 UCA signatures also did not confer sensitivity to this UCA. Because UCA_OPT_2 displays low infectivity, it could not be tested.

[0251] Introduction of V2 apex mature signatures in CH505 TF improved sensitivity to mature bNAbs, and gained sensitivity to CH01 UCA. Introduction of UCA signatures further improved sensitivity to mature bNAbs, to CHOI UCA and gained sensitivity to PCT64 LMCA. FIGS. 9N, 9S.

[0252] SET OPT & UCA_OPT constructs were expressed as chimeric CH505-BG505 SOSIPs (Saunders). Different constructs tested with varying quality & expression. The best was UCA_OPT1 with NxST 332 and gp41 mutations. Binding data was consistent with neutralization results. FIG. 9O.

[0253] Longitudinal Env evolution shows escape predominantly at sites 166, 167, 168 and 169 (Landais et al. Immunity 2017). FIG. 10A. Therefore, TF amino acids at these sites may be associated with sensitivity to PCT64 UCA. All constructs so far have possessed R-166, K˜ 168 and R-169. However, they all have D-167, which is associated with escape from early PCT64 lineage Abs. Therefore, it may be beneficial to introduce mutation D167N.

[0254] D167N was shown to be sensitive for PCT64 LMCA. D167N is associated with escape from early (13 month) PCT64 lineage Abs. FIG. 10B. Intriguingly, later PCT64 Abs (month 18 onwards) become more reliant on N-167. Month 18 Ab is agnostic and Month 24 Ab onwards become more sensitive with D167N. M4C054 is an autologous Env from 4 months that is sensitive to PCT64-LMCA with glycan deletions at 130 and 133. FIG. 10C. This Env has N-167. M18C043 is not neutralized by PCT64-LMCA even with 130 and/or 133 glycan deletion. This Env has D-167. CH505.V2UCAOPT.v3.D167N design and neutralization testing is depicted in FIG. 10D.

### CAM13RRK V2 UCA Optimization: K130H for Improving CH01 UCA Sensitivity and Swapping the Very Long Hypervariable V1 and Negative V2

[0255] CAM13 is natural SIVcpz Env (Nerrienet et al. J Virol. 2005 January; 79 (2): 1312-1319. doi: 10.1128/JVI.79.2.1312-1319.2005). It has been shown that CAM13 mutated to R-169, R-170 and K-171 (called ‘CAM13RRK’) becomes sensitive to CH01, PG9 and PG16 UCAs. FIG. 11A.

[0256] CAM13RRK bas poor reactivity with CHOI UCA. Several experiments have shown that H-130 is the strongest signature for CH01 UCA sensitivity. So the K130H mutation was introduced. For PCT64, position 315 could be improved. However, M-315 in CAM13RRK is very uncommon in HIV, so it was not possible to determine its impact. The 315 signature is only for month 24. Therefore, no change was recommended. CAM13RRK has uncommon HIV amino acids for several outside epitope signatures for PG9 heavy/light reverted. In the epitope, T161M and Y173H can be considered. However, since there is good reactivity with PG9/PG16 UCAs, no change is needed. The signatures for CAM13RRK are shown in FIG. 11B.

[0257] CAM13RRK has very long hypervariable V1 loop. Design construct CAM13RRK delV1 changes the hypervariable V1 loop length from 31 to 23 amino acids. FIG. 11C. The natural loops were modified to introduce deletions and positive charges. FIG. 11D. No gain was identified in hypervariable V1 changes, but gains of +3 net charge (−1 for wildtype to +2 for the construct) was identified. Substantial change in hypervariable V1 length was provided from 31 amino acids for the wildtype region to 12-16 for constructs.

[0258] CAM13RRK bas 5 glycan holes: N130+hyp V2 hole (this should be retained as filling it may reduce V2 apex UCA reactivity); N295+N332 hole (interestingly, this is filled by N442 in one RM (T927)); N386 hole (filled by 2 RMs T927 and T925); and N234 and N616 holes (filling them will likely not impact V2 UCA sensitivity and does not create bNAb sensitivity). FIG. 11E. Natural best hypervariable region has N442 and N386 holes filled. Opt has N234 and N616 filled on top of these two.

### Constructs for Testing:

[0259] CAM13RRK+K130H+Natural Vlh V2h swap+natural gly. Expected to have improved CH01 UCA reactivity. Hyp V1 & V2 loops from best SCIV infected RMs. Based on glycan shielding from RMs, added N442 and N386.

[0260] CAM13RRK+K130H+Opt Vlh V2h swap+opt gly. Expected to have further improved V1 & V2 hyp loops based on best loops from CAM13K/RRK infected RMs. May improve reactivity. Better glycan shielding as N234 and N616 are added.

[0261] Neutralization testing was performed. FIG. 11F. Given that both K130H mutation and V1 hypervariable loop deletion improve sensitivity, a variant that includes both these changes was designed (CAM13RRK_K130H_delV1). Testing is ongoing,

### CAP256SU Based Designed Envs

[0262] Strategy: CAP256SU is quite sensitive to V2 apex mature bNAbs (IC50=0.0004-2.2 μg/ml for CAP256 bNAbs, CH01, PG9, PGDM1400 & PGT145). It is also neutralized by CAP256 UCA (IC50 ˜35 μg/ml). Thus, a variant that is optimized to carry sensitivity signatures for PG9 germline reverted Abs, CH04 UCA, and PCT64 intermediate Abs was designed.

[0263] As before, signatures were calculated for binary phenotypes and sites of interest were found to have at least 2 of the 3: (a) contact site, (b) phylogenetic signature, and/or (c) strong q-value <0.1. For month 35 Abs (35B, 35D, 35G, 350 and 35S; no 35M since on a different branch), only signature sites of interest were 130 and 166. FIG. 12A. These were the same for Month 18 Ab, 18D. 166 already carries sensitive R. H130 was chosen because it is the only signature for CH04 UCA. H-130 is slightly sensitive for month 18, 24 and 35 Abs (odd's ratio=2.6-3.5, p=0.19-0.25 for simple Fisher's). For Month 24 (24F; no 24E since on a different branch), additional sites found are 164, 165 and 315 (all contact sites). Each has the sensitive aa in WT.

[0264] Several other signatures were identified. FIG. 12B.

[0265] Use M-84: Two sensitive signatures M-174 (odds ratio (OR)=2.8-3.4, p=0.007-0.017) and I-174 (OR=2.2-2.3, p=0.015-0.028). Choose M because higher OR and more frequent in C (36.02% vs 35.66% for I), even though it is less frequent in M-group (15.3% vs 44.5% for I).

[0266] Use H-130: H130 is the only sensitive signature for CH04UCA (OR=40-42, p=3.1E-6-8.3E-5. It is rare (6.1% in M, 4.6% in C), similar to D, which is favorable for PG9 germline Abs. D is modestly sensitive for PG9 germline Abs (OR=3.4-4.5, p=0.019-0.024).

[0267] Use M-161: M is most favorable (OR=2.8-3.4, p=0.0007-0.02). It is at 8.8% in C and 18.9% in M-group. A is borderline sensitive signature for PG9 germline (OR=3.3, p=0.03). It has higher frequency in subtype C (21.8% vs 8.8% for M-161). Since M is not that rare and is stronger signature, use M

[0268] Retain D-167: No sensitive signature. Since D is most common in M-group and is in wildtype, we retain it.

[0269] Use Q-170: Q is the only sensitive signature (OR=2.1, p=0.017). Fairly frequent in C and M-group (35% and 47%, respectively). Experimentally validated for CAM13 vs PG16 UCA.

[0270] Use V-172: V is the only sensitive signature (OR=3.2-4.2, p=5.SE-6-0.004). Fairly frequent (35% in M, 33% in C) Also beneficial to remove the negative E.

[0271] Use N-173: N is the strongest sensitive association (OR=13-inf, p=0.0005-0.06). It is rare (2.8% in M, 3.7% in C), but the only other sensitive signature S is also rare (3.8%, 5.6%) (OR=4.1, p=0.065). H is more frequent (16.6% in M, 13.1% in C), but only borderline sensitive signature (OR=2.2-3.1, p=0.08-0.09). Choose N-173 since it is the strongest signature, and while it is rare, it is still found in 51 of 1377 subtype C Envs.

[0272] Retain A-174: Only sensitive signature is S (OR=2.4-2.6, p=0.02-0.08). However it is very rare in subtype C (1.8%), in spite of 10.5% in M. A is only weakly resistant (OR=0.37-0.39, p=0.011-0.057). So, change from A is not warranted. The proposed sequence 172-174 VNA though rare is found multiple times (1.9% in C, 26 out of 1377 and 1.1% in M-group, 49 out of 4399).

[0273] Use A-200: A is the only sensitive signature (OR=2.8-3, p=0.0005-0.0096). It is moderately frequent (25% in M, 34% in C). Site 200 is a contact site (<8.5 Å from V2 apex bNAbs).

[0274] Retain E-269: No sensitive signature, so no need to mutate.

[0275] Use S-336: S is the only sensitive signature (OR=3.5-5.8, p=0.0005-0.0098). It is at 13.9% in C, and less frequent in M-group (8.2%).

[0276] Use N-636: N is the strongest sensitive signature (OR=2.2-16.4, p=0.0002-0.076). Other sensitive signature is S (OR=1.9, p=0.035). N is somewhat common in C (31.3%), slightly rarer in M-group (18%). S is more frequent (53.7% in C, 40.9% in M-group), but it is not chosen since it is a weaker signature than N.

[0277] Use R-732: Only sensitive signature is R (OR=5.4-8.9, p=1.33E-8-0.0084). It is moderately common (35% in M, 61% in C).

[0278] For mature V2 apex bNAbs, positively charged V2 and V2 bypervariable, and shorter V1+V2 hypervariable loops are preferred. For UCA/germline Abs, positively charged V2 and V1+V2 loops are preferred. (V3 charge association is likely due to charged aa signatures in V3, which are accounted for later). Thus, preferred short and positively charged V1 and V2 hypervariable loops were identified. These variants include-SET OPT, UCA_OPT_1 and UCA_OPT_2-which will use the same hypervariable loops. The 208 global virus panel based on most charge per unit hypervariable V1 or hypervariable V2 length were sorted, and ZM233.6 and T250-4 were found to be the most preferred, respectively. FIG. 12C.

[0279] ZM233.6 hyp V1 loop and T250's hyp V2 loop were used. The M-group distributions of V1, V2 and V1+V2 length and charge with CAP256SU WT are shown in FIG. 12D (each in blue, medians in red and constructs in purple).

[0280] Final design includes 10 mutations. FIG. 12E. H-130 accounts for both CH04 UCA and PCT64 intermediate signatures, and the rest are for PG9 germline reverted Abs. Hyp V1 was used from ZM233.6 and hyp V2 was used from T250. The last mutation, G732R, is not in the SHIV construct.

[0281] When CAP256 UCA_OPT was tested, it lost neutralization by CAP256_UCA and gained neutralization only by CH01 UCA (IC50=1.92 μg/ml). To see if neutralization could be regained by CAP256_UCA, all of the changes, except H-130 and hypervariable V1 and V2, were reverted. This is CAP256SU_UCA_OPT_2.0. FIG. 12F.

[0282] CAP256SU constructs were tested without glycan shield filling. (T250 and CH505 TF were glycan shield optimized). FIG. 12H. Background from SHIV_CAP256SU RMs: N339 was predicted to fill the TF glycan hole never comes up in SHIV_CAP256SU RMs; N396 partially fills TF glycan hole and arises in all 3 RMs before breadth detected. Sporadic gain in RM43037 without breadth; N411->N413 shift also in 3 RMs with breadth and not in RM43037 without breadth. This does not impact glycan shield, as we calculate it, but it could improve glycosylation efficiency of the 408 and 413 glycans, or could impact breadth development by some unknown reasons. Based on these data fully glycan shielded CAP256SU_UCA_OPT_2.0 construct with the following glycans added (N396+N413+N339) was tested. K169R and K170R were also added. With glycans added and K169R is CAP256SU_UCA_OPT_3.0 and with K170R added to this is CAP256 UCA_OPT_3.0_K170R. FIG. 12F.

[0283] Neutralize of VR26UCA or VRC26.25, CH01 or CH01 RUA, PG9 or PG9999 RUA, PG16 or PG16 RUA, PCT64 LMCA or PCT64, or Rh-1A or RhA-I neutralization by CAP256SU_V2UCAOPTv3.0K170R_UCA or CAP256SU_V2UCAOPTv3.0K170R_maturebNAb was determined. FIG. 12G.

[0284] Any one of these immunogens could be tested in any suitable animal study to determine immunogenicity of the envelopes.

### Example 6

[0285] This example shows information and sequences of a CAP256_wk34.80 V2 UCA Optimization. In this Example 6 and FIG. 15, CAP256SU_OPT_4.0 is the same as CAP256SU_UCA_OPT_3.0_K170R in FIGS. 8-12 and FIG. 13.

[0286] Previously, 3 design mutations have been successful: N130H; R-169+R-170; and Hyp V1 & V2 loop swaps. It was desired to introduce N130H as it is needed for CH01 UCA reactivity, does not impact CAP256 UCA reactivity and could improve PCT64UCA reactivity. CAP256wk34.80 has 168-KKRR-171 motif. K169R reduces CAP256UCA reactivity by 3-4 fold (CAP256UCAOPT_v2 vs v3). So this motif could be used. A predicted structure is depicted in figure. 15A.

[0287] Hypervariable V1 loop may be improved in charge by +2 units and in length by 2 amino acids (although one more V1 glycan will be added and 130 glycan will be removed). FIG. 15B. Hypervariable V2 loop may be improved in charge by +4 units and in length by 3 amino acids. Further the one V2 loop glycan can be removed to avoid potential steric hindrance. FIG. 15C.

[0288] For CAP256wk34.80, 2 missing glycans (295 and 339) create glycan holes. FIG. 15D. For CAP256SU, glycans were introduced at positions 339, 396 (already present in wk34.80) and 413. 396 and 413 holes are based on longitudinal SHIV_CAP256 evolution. Adding these glycans did not impact CAP256 UCA neutralization. Thus, N413 was also added to the CAP256wk34.80 constructs.

[0289] PCT64UCA escape mutations were investigated. FIG. 15E. N167D was chosen because there are clear signs of escape and structural rationale. Structurally, R-169 and K-169 make sense for investigation. Escape mutations are typically uncharged or negative. However, K-169 is sampled rarely and is not a dominant escape. FIG. 10A. For positions 170 and 171, no or very little escape has been seen in PCT64. Structurally no close interactions appear between these residues and PCT64UCA.

[0290] PCT64UCA could prefer a negative V2 loop. Typically it has been observed that that positive and shorter V2 loops are preferred by V2 apex bNAbs, but for PCT64 UCA predicted structure a positively charged region (light chain) interacts with the hypervariable V2 loop. FIG. 15F. Therefore, designs were optimized for negatively charged loops, using the PCT64 early Env diversity.

[0291] Very little variation in PCT64 Envs was observed up to month 7. FIG. 15G. The PCT64OPT construct has both a shorter loop that still preserves the interaction between the ends of V2 loop of PCT64 Envs with PCT64UCA. Predicted electrostatic energy is improved by 60KJ/mol when this V2 loop used. Also, previously it was identified found that PCT64 mo18-35 Abs are negatively impacted by V2 length and number of glycans.

[0292] The designed V2 loop removes that. A summary of the designs is depicted in FIG. 15H. Neutralization testing experimental data for V2 apex UCA neutralization is depicted in FIG. 15I.

[0293] Two additional designs are proposed. FIG. 15J. CAP256SU_UCA_OPT_4.0 performs the best, and has K-171, while CAP256wk34.80_V2UCA_OPT has R-171. It is hypothesized that the R171K mutation will improve V2 UCA reactivity of

[0294] CAP256wk34.80_V2UCA_OPT. CAP256SU_UCA_OPT_4.0 has the best presentation of V2 UCA sensitive features. However, it has D-167, and it has been shown that PCT64 UCA requires N-167. It is therefore proposed that D167N mutation will improve the chance of CAP256SU_UCA_OPT_4.0 to be sensitive to PCT64 UCA.

[0295] Any one of these immunogens and/or any combination thereof could be tested in any suitable animal study to determine immunogenicity of the envelopes.

### Example 7

[0296] This example shows information and sequences of development of improved constructs and mRNAs.

[0297] Using cleavage site predictions and SignalP (https://services.healthtech.dtu.dk/service.php?SignalP-6.0), it was found that the motif ¹⁶⁸KRRK¹⁷¹ could introduce an aberrant cleavage site into CAM13RRK. To alleviate this, the mutation K168R is predicted to reduce aberrant cleavage site creation, while not significantly impacting V2 apex bNAb sensitivity. Based on this CAM13RRK+K168R (CAM13RRRK) was constructed and tested. FIG. 18A.

[0298] Since CAP256SU_UCA_OPT_4.0 is based on the SHIV_CAP256SU, it has SIVmac239 cytoplasmic tail and Y-375. The reversion Y375S to HIV-1 Ser-375 was tested as CAP256SU_UCA_OPT_4.0 375S and CAP256SU_UCA_OPT_4.0 375S_D167N. Given the advantage of K-171 in other constructs, the R171K mutation was introduced in CAP256wk34.80_V2_UCA_OPT construct. This CAP256wk34.80_V2_UCA_OPT_R17IK construct improved reactivity to several UCAs. FIG. 18B.

[0299] The best CAP256SU construct, CAP256SU_UCA_OPT_4.0, was based on SHIV.CAP256SU (i.e. SIVmac239 cytoplasmic tail). Since HIV-1 constructs will be favorable vaccines, all CAP256SU_UCA_OPT_4.0 design mutations were introduced in the backbone of HIV-1 CAP256SU. Testing as a pseudovirus showed that neutralization profile was comparable if not slightly better than the SHIV-based construct. FIG. 18C.

[0300] CAP256SU_UCAOPT_4.0 is the best CAP256SU based construct. However, this Env has been difficult to stabilize as SOSIP trimers. CAP256wk34.80 is closely related Env to CAP256SU that can make well-folded SOSIPs (Gorman et al. Cell Rep 31 (1): 107448 2020). Therefore the K169R was transformed to CAP256_wk34.80_V2UCA_OPT_R17IK construct to match all the mutations introduced in CAP256SU_UCA_OPT4.0, and tested this CAP256 wk34.80 V2UCA_OPT_RRK Env. FIG. 18D. Based on the bending of neutralization curve for PCT64 UCA, CAP256_wk34.80_V2UCA_OPT_RRK_D167N will also be tested, which has been shown to be a necessary requirement for PCT64 UCA reactivity.

[0301] Strategy 1 for HIV_CAP256SU_UCA_OPT_4.0 mRNA designs. FIG. 18E. Four mRNA constructs that introduce stabilization mutations gradually:

$$mRNA 1 : Joe 2$$

$$mRNA 2 : Joe 2 + F 14$$

$$* SOSIP = A 501 C + T 605 C + I 559 P$$

$$\# Kwong\_muts added are 3 mut + 2 G + RnS ( FIG . 18 E )$$

[0302] 1535N may also be included. Added the RnS mutations because CAP256SU and CAP256wk34.80 are quite similar to each other.

[0303] All mRNA constructs have the signal peptide & cytoplasmic tail from CH848 mRNA constructs. From PDB 6VTT (Gorman et al.) it appears to be the bolded following: MTVTGTWRNYQQWWIWGILGFWMLMICNGLWV. Alignment of sequences for HIV_CAP256SU_UCA_OPT_4.0; mRNAI_CAP256SU_UCA_OPT_4.0; and mRNA2 CAP256SU_UCA_OPT_4.0 is depicted in FIG. 18 F. Dots indicate deletions and dashes indicate identities.

[0304] Strategy 2 for CAP256SU_UCA_OPT_4.0 mRNA designs. Using stabilization and expression strategies from Mu et al. Cell Rep 38 (11): 110514 (2022), gp150 and gp160 mRNA constructs were designed for HIV_CAP256SU_UCA_OPT_v4.0. These sequences are denoted HV1303230 to HV1303254. FIG. 17.

[0305] Any one of these immunogens and/or any combination thereof could be tested in any suitable animal study to determine immunogenicity of the envelopes.

The application's sequence listing, which the Patent Office published only in electronic form, follows.

SEQUENCE LISTING (447 sequences)

SEQ ID NO: 1 - protein, 11 aa, synthetic construct
STYNNTHNISK

SEQ ID NO: 2 - protein, 6 aa, synthetic construct
NKNGRQ

SEQ ID NO: 3 - protein, 4 aa, synthetic construct
  MOD_RES 2: note = N embedded in a N-linked glycosylation site
  MOD_RES 4: note = N embedded in a N-linked glycosylation site
LNGN

SEQ ID NO: 4 - protein, 4 aa, synthetic construct
VDAT

SEQ ID NO: 5 - protein, 4 aa, synthetic construct
REKR

SEQ ID NO: 6 - protein, 9 aa, synthetic construct
RRVVEREKR

SEQ ID NO: 7 - protein, 9 aa, synthetic construct
ERVVEREKE

SEQ ID NO: 8 - protein, 4 aa, synthetic construct
SEKS

SEQ ID NO: 9 - protein, 79 aa, synthetic construct
MRVMGIQRNYPQWWIWSMLGFWMLMICNGMWVTVYYGVPVWKEAKTTLFCASDAKAYEKEVHNVWATHACVPTDPNPQE

SEQ ID NO: 10 - protein, 24 aa, synthetic construct
MPMGSLQPLATLYLLGMLVASVLA

SEQ ID NO: 11 - protein, 25 aa, synthetic construct
MAISGVPVLGFFIIAVLMSAQESWA

SEQ ID NO: 12 - protein, 12 aa, synthetic construct
RPVFSSPPSYFQ

SEQ ID NO: 13 - protein, 10 aa, synthetic construct
GGGGSGGGGS

SEQ ID NO: 14 - protein, 23 aa, synthetic construct
GSAGSAGSGSAGSGSAGSGSAGS

SEQ ID NO: 15 - protein, 19 aa, synthetic construct
MGWSCIILFLVATATGVHA

SEQ ID NO: 16 - protein, 30 aa, synthetic construct
MDSKGSSQKGSRLLLLLVVSNLLLPQGVLA

SEQ ID NO: 17 - RNA, 145 nt, synthetic construct
  source 1..145: mol_type = other RNA
agcataaaagtctcaacacaacatatacaaaacaaacgaatctcaagcaatcaagcattctacttctattgcagcaatttaaatcatttcttttaaagcaaaagcaattttctgaaaattttcaccatttacgaacgatagcgct

SEQ ID NO: 18 - RNA, 165 nt, synthetic construct
  source 1..165: mol_type = other RNA
actagtagtgactgactaggatctggttaccactaaaccagcctcaagaacacccgaatggagtctctaagctacataataccaacttacacttacaaaatgttgtcccccaaaatgtagccattcgtatctgctcctaataaaaagaaagtttcttcacattct

SEQ ID NO: 19 - RNA, 101 nt, synthetic construct
  source 1..101: mol_type = other RNA
aaaaaaaaaaaaaaaaaaaaaaaaaaaaaaaaaaaaaaaaaaaaaaaaaaaaaaaaaaaaaaaaaaaaaaaaaaaaaaaaaaaaaaaaaaaaaaaaaaaaa

SEQ ID NO: 20 - protein, 4 aa, synthetic construct
KRRK

SEQ ID NO: 21 - protein, 32 aa, synthetic construct
MTVTGTWRNYQQWWIWGILGFWMLMICNGLWV

SEQ ID NO: 22 - protein, 37 aa, synthetic construct
KDDOVTELRDKKKEYYEFTSITYOKHMKDSRNKFDVQ

SEQ ID NO: 23 - protein, 36 aa, synthetic construct
KOOATELRDKKKEYYDYTSITYOEKMKDDRRKFDIL

SEQ ID NO: 24 - protein, 36 aa, synthetic construct
KOOITELRDREKKNYDYTSIAYNEEMKESENKLOIL

SEQ ID NO: 25 - protein, 36 aa, synthetic construct
KHOATELRDKQKVNYDYTSITYOKEMKDSRNKFOIL

SEQ ID NO: 26 - protein, 32 aa, synthetic construct
ANKHOATELRDKQKVNYDYTSITYNKEMRDSG

SEQ ID NO: 27 - protein, 33 aa, synthetic construct
MDOVELRDKKKEYSIAVEVKSRIQDRQMISLFR

SEQ ID NO: 28 - protein, 33 aa, synthetic construct
LOOAELRDKKKEYALVVEIKSRIQDIQMIDLFG

SEQ ID NO: 29 - protein, 33 aa, synthetic construct
INOMELRDKRKVFSMAVERKSHIQATGMINLFR

SEQ ID NO: 30 - protein, 33 aa, synthetic construct
MOOIELRDREKKNALVVEITSRIQQSQMISLLG

SEQ ID NO: 31 - protein, 33 aa, synthetic construct
MHOAELRDKQKVNALVVEITSRIQQSQMISLFG

SEQ ID NO: 32 - protein, 33 aa, synthetic construct
MHOMELRDKQKVNALAVEIKSRIQDSQMISLFR

SEQ ID NO: 33 - protein, 29 aa, synthetic construct
MHOMELRDKQKVNALAVEIKSRIQDSQMS

SEQ ID NO: 34 - protein, 28 aa, synthetic construct
MHOMELRDKQKVNALAVEIKSRIQDSQS

SEQ ID NO: 35 - protein, 846 aa, synthetic construct
MRVMGIQRNYPQWWIWSMLGFWMLMICNGMWVTVYYGVPVWKEAKTTLFCASDAKAYEKEVHNVWATHACVPTDPNPQEMVLKNVTENFNMWKNDMVDQMHEDVISLWDQSLKPCVKLTPLCVTLNCTNATASNSSIIEGMKNCSFNITTELRDKREKKNALFYKLDIVQLDGNSSQYRLINCNTSVITQACPKVSFDPIPIHYCAPAGYAILKCNNKTFTGTGPCNNVSTVQCTHGIKPVVSTQLLLNGSLAEGEIIIRSENITNNVKTIIVHLNESVKIECTRPNNKTRTSIRIGPGQAFYATGQVIGDIREAYCNINESKWNETLQRVSKKLKEYFPHKNITFQPSSGGDLEITTHSFNCGGEFFYCNTSSLFNRTYMANSTDMANSTETNSTRTITIHCRIKQIINMWQEVGRAMYAPPIAGNITCISNITGLLLTRDGGKNNTETFRPGGGNMKDNWRSELYKYKVVEVKPLGVAPTNARRRVVEREKRAVGMGAVFLGFLGAAGSTMGAASITLTVQARQLLSGIVQQQSNLLKAIEAQQHMLKLTVWGIKQLQARVLALERYLKDQQLLGMWGCSGKLICTTNVYWNSSWSNKTYGDIWDNMTWMQWEREISNYTEIIYELLEESQNQQEKNEQDLLALDRWNSLWNWFNITNWLWYIKIFIMIVGGLIGLRIIFAVLSLVNRVRQGYSPLSLQTLIPSPRGPDRPGGIEEEGGEQDRNRSTRLVSGFLALVWDDLRSLCLFIYHRLRDFILIAARAGELLGRSSLKGLRRGWEALKYLGSLVQYWGLELKRSAISLLDTLAIAVGEGTDRILEFVLGICRAIRNIPTRIRQGFETALL

SEQ ID NO: 36 - protein, 856 aa, synthetic construct
MRVKEKYQHLWRWGWRWGTMLLGMLMICSATEKLWVTVYYGVPVWKEATTTLFCASDAKAYDTEVHNVWATHACVPTDPNPQEVVLVNVTENFNMWKNDMVEQMHEDIISLWDQSLKPCVKLTPLCVSLKCTDLKNDTNTNSSSGRMIMEKGEIKNCSFNISTSIRGKVQKEYAFFYKLDIIPIDNDTTSYKLTSCNTSVITQACPKVSFEPIPIHYCAPAGFAILKCNNKTFNGTGPCTNVSTVQCTHGIRPVVSTQLLLNGSLAEEEVVIRSVNFTDNAKTIIVQLNTSVEINCTRPNNNTRKRIRIQRGPGRAFVTIGKIGNMRQAHCNISRAKWNNTLKQIASKLREQFGNNKTIIFKQSSGGDPEIVTHSFNCGGEFFYCNSTQLFNSTWFNSTWSTEGSNNTEGSDTITLPCRIKQIINMWQKVGKAMYAPPISGQIRCSSNITGLLLTRDGGNSNNESEIFRPGGGDMRDNWRSELYKYKVVKIEPLGVAPTKAKRRVVQREKRAVGIGALFLGFLGAAGSTMGAASMTLTVQARQLLSGIVQQQNNLLRAIEAQQHLLQLTVWGIKQLQARILAVERYLKDQQLLGIWGCSGKLICTTAVPWNASWSNKSLEQIWNHTTWMEWDREINNYTSLIHSLIEESQNQQEKNEQELLELDKWASLWNWFNITNWLWYIKLFIMIVGGLVGLRIVFAVLSIVNRVRQGYSPLSFQTHLPTPRGPDRPEGIEEEGGERDRDRSIRLVNGSLALIWDDLRSLCLFSYHRLRDLLLIVTRIVELLGRRGWEALKYWWNLLQYWSQELKNSAVSLLNATAIAVAEGTDRVIEVVQGACRAIRHIPRRIRQGLERILL

SEQ ID NO: 37 - protein, 855 aa, synthetic construct
MRVMGIQRNYPPLWRWGTMIFWMMMLCSAEKLWVTVYYGVPVWREADTTLFCASDAKGYDTEAHNVWATHACVPTDPRPQEMYLENVTENFNMWKNSMVEQMHTDIISLWDESLKPCVKLTPLCVTLDCQAFNSSSHTNSSIAMQEMKNCSFNVTTELRDKKKKEYSFFYKTDIEQINKNGRQYRLINCNTSAITQACPKVSFEPIPIHFCAPAGFAILKCNEKHFNGKGPCKNVSTVQCTHGIKPVVSTQLLLNGSLAEEEVVIRVENTIDNAKTIIVQLAKPVKINCTRPNNNTRKSIRIGPGQTFYATGDIIGNIRKAYCNVSKREWNNTLQQVAAQLSKSFNNTKIVFEKHSGGDLEVITHSFVCGGEFFYCNTSGLFNSTWTNSTWTNSTTGSNGTESNDTITLQCEIKQFINMWQRVGRAMYAPPIPGVIRCESDITGLLLTRDGPNSTQNETFRPGGGDMRDNWRSELYKYKVVQIEPLGVAPTHAKRRVVEREKRAVGLGAVFFGFLGAAGSTMGAASITLTVQARQLLSGIVQQQSNLLKAIEAQQQLLRLTVWGIKQLQARVLALERYLKDQQLLGIWGCSGKLICTTTVPWNSSWSNKNYTDIWDNMTWLQWDREISNYTDEIYRLIEQSQNQQEKNEQDLLALDKWASLWNWFDITNWLWYIKIFIMIVGGLIGLRIIFTVLNVINRVRQGYSPLSFQTLTHHQREPDRPERIEEGGGEQDRDRSVRLVSGFLALAWDDLRSLCLFSFHRLRDLVLIAARGVELLGHSSLKGLRLGWEALKLLGNLLSYWGQELKNSAINLLDAVAIAVANWTDRVIKIGQRAGRAILNIPIRIRQGLERALL

SEQ ID NO: 38 - protein, 835 aa, synthetic construct
MRVRGIMRNWQQWWIWGSLGFWMLIICNVMGSLWVTVYYGVPVWREAKTTLFCASDAKAYETEAHSVWATHACVPTDPNPQEMVLENVTENFNMWKNDMVDQMHEDVISIWDQSLKPCVKLTPLCVTLDCSTYNNTHNISKEMKICSFNMTTELRDKKRKVNVLFYKLDLVPLTNSSNTTNYRLISCNTSTITQACPKVSFDPIPIHYCAPAGYAILKCNNKTFNGTGPCNNVSTVQCTHGIKPVVSTQLLLNGSLAEEEIIIRFENLTDNVKIIIVQLNETINITCTRPNNNTRKSIRIGPGQSFYATGEIVGNIREAHCNISASKWNKTLERVRTKLKEHFPNKTIEFEPSSGGDLEITTHSFNCGGEFFYCNTSGLFNSAINGTLTSNVTLPCRIKQIINMWQEVGRAMYAPPIAGNITCKSNITGLLLTRDGGENSSSTTETFRPTGGDMKNNWRSELYKYKVVEIKPLGIAPTEAKRRVVEREKRAVGIGAVFLGFLGAAGSTMGAASMTLTVQARQLLSGIVQQQSNLLKAIEAQQHMLQLTVWGIKQLQARVLAIERYLKDQQLLGLWGCSGKLICTTNVPWNASWSNKSKNDIWDNMTWMQWDREISNHTDTIYRLLEDSQNQQEKNEKDLLALDSWKNLWNWFSITKWLWYIKIFIMIVGGLIGLRIIFAVLSIVNRVRQGYSPLSFQTLTPNPRGPDRLGGIEEEGGEQDKNKSRRLVTGFLPVVWDDLRSLCLFSYHLLRDFILIVARTVELLGRRGWEALKYLGGLVQYWGLELKKSTISLLDTIAIVVAEGTDRIIEVLQRIGRAIYNIPRRIRQGFETALL

SEQ ID NO: 39 - protein, 860 aa, synthetic construct
MRVMGIQRNCQHLFRWGTMILGMIIICSAAENLWVTVYYGVPVWKDAETTLFCASDAKAYETEKHNVWATHACVPTDPNPQEIHLENVTEEFNMWKNNMVEQMHTDIISLWDQSLKPCVKLTPLCVTLQCTNVTNNITDDMRGELKNCSFNMTTELRDKKQKVYSLFYRLDVVQINENQGNRSNNSNKEYRLINCNTSAITQACPKVSFEPIPIHYCAPAGFAILKCKDKKFNGTGPCPSVSTVQCTHGIKPVVSTQLLLNGSLAEEEVMIRSENITNNAKNILVQFNTPVQINCTRPNNNTRKSIRIGPGQAFYATGDIIGDIRQAHCNVSKATWNETLGKVVKQLRKHFGNNTIIRFANSSGGDLEVTTHSFNCGGEFFYCNTSGLFNSTWISNTSVQGSNSTGSNDSITLPCRIKQIINMWQRIGQAMYAPPIQGVIRCVSNITGLILTRDGGSTNSTTETFRPGGGDMRDNWRSELYKYKVVKIEPLGVAPTRAKRRVVGREKRAVGIGAVFLGFLGAAGSTMGAASMTLTVQARNLLSGIVQQQSNLLRAIEAQQHLLKLTVWGIKQLQARVLAVERYLRDQQLLGIWGCSGKLICTTNVPWNSSWSNRNLSEIWDNMTWLQWDKEISNYTQIIYGLLEESQNQQEKNEQDLLALDKWASLWNWFDISNWLWYIKIFIMIVGGLIGLRIVFAVLSVIHRVRQGYSPLSFQTHTPNPRGLDRPERIEEEDGEQDRGRSTRLVSGFLALAWDDLRSLCLFCYHRLRDFILIAARIVELLGHSSLKGLRLGWEGLKYLWNLLAYWGRELKISAINLFDTIAIAVAEWTDRVIEIGQRLCRAFLHIPRRIRQGLERALL

SEQ ID NO: 40 - protein, 845 aa, synthetic construct
MRVMGIQRNYPQWWIWSMLGFWMLMICNGMWVTVYYGVPVWKEAKTTLFCASDAKAYEKEVHNVWATHACVPTDPNPQEMVLKNVTENFNMWKNDMVDQMHEDVISLWDQSLKPCVKLTPLCVTLHCSTYNNTHNISKGMKNCSFNATTELRDKKQKVNALFYKLDIVQLNKNGRQYRLINCNTSVITQACPKVSFDPIPIHYCAPAGYAILKCNNKTFNGTGPCNNVSTVQCTHGIKPVVSTQLLLNGSLAEGEIIIRSENITNNVKTIIVHLNESVKIECTRPNNKTRTSIRIGPGQTFYATGQVIGDIREAYCNINKSKWNETLQRVSKKLKEYFPHKNITFQPSSGGDLEITTHSFNCGGEFFYCNTSSLFNRTYMANSTDMANSTETNSTRTITIHCRIKQIINMWQEVGRAMYAPPIAGNITCISNITGLLLTRDGGKNNTETFRPGGGNMKDNWRSELYKYKVVEVKPLGVAPTNARRRVVEREKRAVGMGAVFLGFLGAAGSTMGAASITLTVQARQLLSGIVQQQSNLLKAIEAQQHMLKLTVWGIKQLQARVLALERYLKDQQLLGMWGCSGKLICTTNVYWNSSWSNKTYGDIWDNMTWMQWDREISNYTEIIYRLLEESQNQQEKNEQDLLALDRWNSLWNWFNITNWLWYIKIFIMIVGGLIGLRIIFAVLSLVNRVRQGYSPLSFQTLIPSPRGPDRPGGIEEEGGEQDRNRSTRLVSGFLALVWDDLRSLCLFIYHRLRDFILIAARAGELLGRSSLKGLRRGWEALKYLGSLVQYWGLELKRSAISLLDTLAIAVGEGTDRILEFVLGICRAIRNIPTRIRQGFETALL

SEQ ID NO: 41 - protein, 845 aa, synthetic construct
MRVMGIQRNYPQWWIWSMLGFWMLMICNGMWVTVYYGVPVWKEAKTTLFCASDAKAYEKEVHNVWATHACVPTDPNPQEMVLKNVTENFNMWKNDMVDQMHEDVISLWDQSLKPCVKLTPLCVTLHCSTYNNTHNISKGMKNCSFNATTELRDKKQKVNALFYKLDIVQLNKNGRQYRLINCNTSVITQACPKVSFDPIPIHYCAPAGYAILKCNNKTFNGTGPCNNVSTVQCTHGIKPVVSTQLLLNGSLAEGEIIIRSENITNNVKTIIVHLNESVKIECTRPNNKTRTSIRIGPGQTFYATGQVIGDIREAYCNISKSKWNETLQRVSKKLKEYFPHKNITFQPSSGGDLEITTHSFNCGGEFFYCNTSSLFNRTYMANSTDMANSTETNSTRTITIHCRIKQIINMWQEVGRAMYAPPIAGNITCISNITGLLLTRDGGKNNTETFRPGGGNMKDNWRSELYKYKVVEVKPLGVAPTNARRRVVEREKRAVGMGAVFLGFLGAAGSTMGAASITLTVQARQLLSGIVQQQSNLLKAIEAQQHMLKLTVWGIKQLQARVLALERYLKDQQLLGMWGCSGKLICTTNVYWNSSWSNKTYGDIWDNMTWMQWDREISNYTEIIYRLLEESQNQQEKNEQDLLALDRWNSLWNWFNITNWLWYIKIFIMIVGGLIGLRIIFAVLSLVNRVRQGYSPLSFQTLIPSPRGPDRPGGIEEEGGEQDRNRSTRLVSGFLALVWDDLRSLCLFIYHRLRDFILIAARAGELLGRSSLKGLRRGWEALKYLGSLVQYWGLELKRSAISLLDTLAIAVGEGTDRILEFVLGICRAIRNIPTRIRQGFETALL

SEQ ID NO: 42 - protein, 845 aa, synthetic construct
MRVMGIQRNYPQWWIWSMLGFWMLMICNGMWVTVYYGVPVWKEAKTTLFCASDAKAYEKEVHNVWATHACVPTDPNPQEMVLKNVTENFNMWKNDMVDQMHEDVISLWDQSLKPCVKLTPLCVTLHCSTYNNTHNISKGMKNCSFNMTTELRDKKQKVNALFYKLDIVQLNKNGRQYRLINCNTSAITQACPKVSFDPIPIHYCAPAGYAILKCNNKTFNGTGPCNNVSTVQCTHGIKPVVSTQLLLNGSLAEGEIIIRSENITNNVKTIIVHLNESVKIECTRPNNKTRKSIRIGPGQTFYATGDVIGDIREAYCNINKSKWNETLQRVSKKLKEYFPHKNITFQPSSGGDLEITTHSFNCGGEFFYCNTSSLFNRTYMANSTDMANSTETNSTRTITIHCRIKQIINMWQEVGRAMYAPPIAGNITCISNITGLLLTRDGGKNNTETFRPGGGNMKDNWRSELYKYKVVEVKPLGVAPTNARRRVVEREKRAVGMGAVFLGFLGAAGSTMGAASITLTVQARQLLSGIVQQQSNLLKAIEAQQHMLKLTVWGIKQLQARVLALERYLKDQQLLGMWGCSGKLICTTNVYWNSSWSNKTYGDIWDNMTWMQWDREISNYTEIIYRLLEESQNQQEKNEQDLLALDRWNSLWNWFNITNWLWYIKIFIMIVGGLIGLRIIFAVLSLVNRVRQGYSPLSFQTLIPSPRGPDRPGRIEEEGGEQDRNRSTRLVSGFLALVWDDLRSLCLFIYHRLRDFILIAARAGELLGRSSLKGLRRGWEALKYLGSLVQYWGLELKRSAISLLDTLAIAVGEGTDRILEFVLGICRAIRNIPTRIRQGFETALL

SEQ ID NO: 43 - protein, 845 aa, synthetic construct
MRVMGIQRNYPQWWIWSMLGFWMLMICNGMWVTVYYGVPVWKEAKTTLFCASDAKAYEKEVHNVWATHACVPTDPNPQEMVLKNVTENFNMWKNDMVDQMHEDVISLWDQSLKPCVKLTPLCVTLHCSTYNNTHNISKGMKNCSFNMTTELRDKKQKVNALFYKLDIVQLNKNGRQYRLINCNTSAITQACPKVSFDPIPIHYCAPAGYAILKCNNKTFNGTGPCNNVSTVQCTHGIKPVVSTQLLLNGSLAEGEIIIRSENITNNVKTIIVHLNESVKIECTRPNNKTRKSIRIGPGQTFYATGDVIGDIREAYCNISKSKWNETLQRVSKKLKEYFPHKNITFQPSSGGDLEITTHSFNCGGEFFYCNTSSLFNRTYMANSTDMANSTETNSTRTITIHCRIKQIINMWQEVGRAMYAPPIAGNITCISNITGLLLTRDGGKNNTETFRPGGGNMKDNWRSELYKYKVVEVKPLGVAPTNARRRVVEREKRAVGMGAVFLGFLGAAGSTMGAASITLTVQARQLLSGIVQQQSNLLKAIEAQQHMLKLTVWGIKQLQARVLALERYLKDQQLLGMWGCSGKLICTTNVYWNSSWSNKTYGDIWDNMTWMQWDREISNYTEIIYRLLEESQNQQEKNEQDLLALDRWNSLWNWFNITNWLWYIKIFIMIVGGLIGLRIIFAVLSLVNRVRQGYSPLSFQTLIPSPRGPDRPGRIEEEGGEQDRNRSTRLVSGFLALVWDDLRSLCLFIYHRLRDFILIAARAGELLGRSSLKGLRRGWEALKYLGSLVQYWGLELKRSAISLLDTLAIAVGEGTDRILEFVLGICRAIRNIPTRIRQGFETALL

SEQ ID NO: 44 - protein, 845 aa, synthetic construct
MRVMGIQRNYPQWWIWSMLGFWMLMICNGMWVTVYYGVPVWKEAKTTLFCASDAKAYEKEVHNVWATHACVPTDPNPQEMVLKNVTENFNMWKNDMVDQMHEDVISLWDQSLKPCVKLTPLCVTLHCSTYNNTHNISKGMKNCSFNMTTELRDKKQKVNALFYKLDIVQLNKNGRQYRLINCNTSAITQACPKVSFDPIPIHYCAPAGYAILKCNNKTFNGTGPCNNVSTVQCTHGIKPVVSTQLLLNGSLAEGEIIIRSENITNNVKTIIVHLNESVKIECTRPNNKTRKSIRIGPGQTFYATGDVIGDIREAYCNINKSKWNETLQRVSKKLKEYFPHKNITFQPSSGGDLEITTHSFNCGGEFFYCNTSSLFNRTYMANSTDMANSTETNSTRTITIHCRIKQIINMWQEVGRAMYAPPIAGNITCISNITGLLLTRDGGKNNTETFRPGGGNMKDNWRSELYKYKVVEVKPLGVAPTNARRRVVEREKRAVGMGAVFLGFLGAAGSTMGAASITLTVQARQLLSGIVQQQSNLLKAIEAQQHMLKLTVWGIKQLQARVLALERYLKDQQLLGMWGCSGKLICTTNVYWNSSWSNKTYGDIWDNMTWMQWDREISNYTEIIYRLLEESQNQQEKNEQDLLALDRWNSLWNWFNITNWLWYIKIFIMIVGGLIGLRIIFAVLSLVNRVRQGYSPLSFQTLIPSPRGPDRPGRIEEGGGEQDRNRSTRLVSGFLALVWDDLRSLCLFIYHRLRDFILIAARAGELLGRSSLKGLRRGWEALKYLGSLVQYWGLELKRSAISLLDTLAIAVGEGTDRILEFVLGICRAIRHIPTRIRQGFETALL

SEQ ID NO: 45 - protein, 845 aa, synthetic construct
MRVMGIQRNYPQWWIWSMLGFWMLMICNGMWVTVYYGVPVWKEAKTTLFCASDAKAYEKEVHNVWATHACVPTDPNPQEMVLKNVTENFNMWKNDMVDQMHEDVISLWDQSLKPCVKLTPLCVTLHCSTYNNTHNISKGMKNCSFNMTTELRDKKQKVNALFYKLDIVQLNKNGRQYRLINCNTSAITQACPKVSFDPIPIHYCAPAGYAILKCNNKTFNGTGPCNNVSTVQCTHGIKPVVSTQLLLNGSLAEGEIIIRSENITNNVKTIIVHLNESVKIECTRPNNKTRKSIRIGPGQTFYATGDVIGDIREAYCNISKSKWNETLQRVSKKLKEYFPHKNITFQPSSGGDLEITTHSFNCGGEFFYCNTSSLFNRTYMANSTDMANSTETNSTRTITIHCRIKQIINMWQEVGRAMYAPPIAGNITCISNITGLLLTRDGGKNNTETFRPGGGNMKDNWRSELYKYKVVEVKPLGVAPTNARRRVVEREKRAVGMGAVFLGFLGAAGSTMGAASITLTVQARQLLSGIVQQQSNLLKAIEAQQHMLKLTVWGIKQLQARVLALERYLKDQQLLGMWGCSGKLICTTNVYWNSSWSNKTYGDIWDNMTWMQWDREISNYTEIIYRLLEESQNQQEKNEQDLLALDRWNSLWNWFNITNWLWYIKIFIMIVGGLIGLRIIFAVLSLVNRVRQGYSPLSFQTLIPSPRGPDRPGRIEEGGGEQDRNRSTRLVSGFLALVWDDLRSLCLFIYHRLRDFILIAARAGELLGRSSLKGLRRGWEALKYLGSLVQYWGLELKRSAISLLDTLAIAVGEGTDRILEFVLGICRAIRHIPTRIRQGFETALL

SEQ ID NO: 46 - protein, 647 aa, synthetic construct
MPMGSLQPLATLYLLGMLVASVLAAENLWVTVYYGVPVWKEAKTTLFCASDAKAYEKKVHNVWATHACVPTDPNPQEMVLKNVTENFNMWKNDMVDQMHEDVISLWDQSLKPCVKLTPLCVTLNCTNATASNSSIIEGMKNCSFNITTELRDKREKKNALFYKLDIVQLDGNSSQYRLINCNTSVITQACPKVSFDPIPIHYCAPAGYAILKCNNKTFTGTGPCNNVSTVQCTHGIKPVVSTQLLLNGSLAEGEIIIRSENITNNVKTIIVHLNESVKIECTRPNNKTRTSIRIGPGQWFYATGQVIGDIREAYCNINESKWNETLQRVSKKLKEYFPHKNITFQPSSGGDLEITTHSFNCGGEFFYCNTSSLFNRTYMANSTDMANSTETNSTRTITIHCRIKQIINMWQEVGRAMYAPPIAGNITCISNITGLLLTRDGGKNNTETFRPGGGNMKDNWRSELYKYKVVKIEPLGVAPTRCKRRVVGRRRRRRAVGIGAVFLGFLGAAGSTMGAASMTLTVQARNLLSGIVQQQSNLLRAPEAQQHLLKLTVWGIKQLQARVLAVERYLRDQQLLGIWGCSGKLICCTNVPWNSSWSNRNLSEIWDNMTWLQWDKEISNYTQIIYGLLEESQNQQEKNEQDLLALD

SEQ ID NO: 47 - protein, 646 aa, synthetic construct
MPMGSLQPLATLYLLGMLVASVLAAENLWVTVYYGVPVWKEAKTTLFCASDAKAYEKKVHNVWATHACVPTDPNPQEMVLKNVTENFNMWKNDMVDQMHEDVISLWDQSLKPCVKLTPLCVTLHCSTYNNTHNISKGMKNCSFNATTELRDKKQKVNALFYKLDIVQLNKNGRQYRLINCNTSVITQACPKVSFDPIPIHYCAPAGYAILKCNNKTFNGTGPCNNVSTVQCTHGIKPVVSTQLLLNGSLAEGEIIIRSENITNNVKTIIVHLNESVKIECTRPNNKTRTSIRIGPGQTFYATGQVIGDIREAYCNINKSKWNETLQRVSKKLKEYFPHKNITFQPSSGGDLEITTHSFNCGGEFFYCNTSSLFNRTYMANSTDMANSTETNSTRTITIHCRIKQIINMWQEVGRAMYAPPIAGNITCISNITGLLLTRDGGKNNTETFRPGGGNMKDNWRSELYKYKVVKIEPLGVAPTRCKRRVVGRRRRRRAVGIGAVFLGFLGAAGSTMGAASMTLTVQARNLLSGIVQQQSNLLRAPEAQQHLLKLTVWGIKQLQARVLAVERYLRDQQLLGIWGCSGKLICCTNVPWNSSWSNRNLSEIWDNMTWLQWDKEISNYTQIIYGLLEESQNQQEKNEQDLLALD

SEQ ID NO: 48 - protein, 646 aa, synthetic construct
MPMGSLQPLATLYLLGMLVASVLAAENLWVTVYYGVPVWKEAKTTLFCASDAKAYEKKVHNVWATHACVPTDPNPQEMVLKNVTENFNMWKNDMVDQMHEDVISLWDQSLKPCVKLTPLCVTLHCSTYNNTHNISKGMKNCSFNATTELRDKKQKVNALFYKLDIVQLNKNGRQYRLINCNTSVITQACPKVSFDPIPIHYCAPAGYAILKCNNKTFNGTGPCNNVSTVQCTHGIKPVVSTQLLLNGSLAEGEIIIRSENITNNVKTIIVHLNESVKIECTRPNNKTRTSIRIGPGQTFYATGQVIGDIREAYCNISKSKWNETLQRVSKKLKEYFPHKNITFQPSSGGDLEITTHSFNCGGEFFYCNTSSLFNRTYMANSTDMANSTETNSTRTITIHCRIKQIINMWQEVGRAMYAPPIAGNITCISNITGLLLTRDGGKNNTETFRPGGGNMKDNWRSELYKYKVVKIEPLGVAPTRCKRRVVGRRRRRRAVGIGAVFLGFLGAAGSTMGAASMTLTVQARNLLSGIVQQQSNLLRAPEAQQHLLKLTVWGIKQLQARVLAVERYLRDQQLLGIWGCSGKLICCTNVPWNSSWSNRNLSEIWDNMTWLQWDKEISNYTQIIYGLLEESQNQQEKNEQDLLALD

SEQ ID NO: 49 - protein, 646 aa, synthetic construct
MPMGSLQPLATLYLLGMLVASVLAAENLWVTVYYGVPVWKEAKTTLFCASDAKAYEKKVHNVWATHACVPTDPNPQEMVLKNVTENFNMWKNDMVDQMHEDVISLWDQSLKPCVKLTPLCVTLHCSTYNNTHNISKGMKNCSFNMTTELRDKKQKVNALFYKLDIVQLNKNGRQYRLINCNTSAITQACPKVSFDPIPIHYCAPAGYAILKCNNKTFNGTGPCNNVSTVQCTHGIKPVVSTQLLLNGSLAEGEIIIRSENITNNVKTIIVHLNESVKIECTRPNNKTRKSIRIGPGQTFYATGDVIGDIREAYCNINKSKWNETLQRVSKKLKEYFPHKNITFQPSSGGDLEITTHSFNCGGEFFYCNTSSLFNRTYMANSTDMANSTETNSTRTITIHCRIKQIINMWQEVGRAMYAPPIAGNITCISNITGLLLTRDGGKNNTETFRPGGGNMKDNWRSELYKYKVVKIEPLGVAPTRCKRRVVGRRRRRRAVGIGAVFLGFLGAAGSTMGAASMTLTVQARNLLSGIVQQQSNLLRAPEAQQHLLKLTVWGIKQLQARVLAVERYLRDQQLLGIWGCSGKLICCTNVPWNSSWSNRNLSEIWDNMTWLQWDKEISNYTQIIYGLLEESQNQQEKNEQDLLALD

SEQ ID NO: 50 - protein, 646 aa, synthetic construct
MPMGSLQPLATLYLLGMLVASVLAAENLWVTVYYGVPVWKEAKTTLFCASDAKAYEKKVHNVWATHACVPTDPNPQEMVLKNVTENFNMWKNDMVDQMHEDVISLWDQSLKPCVKLTPLCVTLHCSTYNNTHNISKGMKNCSFNMTTELRDKKQKVNALFYKLDIVQLNKNGRQYRLINCNTSAITQACPKVSFDPIPIHYCAPAGYAILKCNNKTFNGTGPCNNVSTVQCTHGIKPVVSTQLLLNGSLAEGEIIIRSENITNNVKTIIVHLNESVKIECTRPNNKTRKSIRIGPGQTFYATGDVIGDIREAYCNISKSKWNETLQRVSKKLKEYFPHKNITFQPSSGGDLEITTHSFNCGGEFFYCNTSSLFNRTYMANSTDMANSTETNSTRTITIHCRIKQIINMWQEVGRAMYAPPIAGNITCISNITGLLLTRDGGKNNTETFRPGGGNMKDNWRSELYKYKVVKIEPLGVAPTRCKRRVVGRRRRRRAVGIGAVFLGFLGAAGSTMGAASMTLTVQARNLLSGIVQQQSNLLRAPEAQQHLLKLTVWGIKQLQARVLAVERYLRDQQLLGIWGCSGKLICCTNVPWNSSWSNRNLSEIWDNMTWLQWDKEISNYTQIIYGLLEESQNQQEKNEQDLLALD

SEQ ID NO: 51 - protein, 646 aa, synthetic construct; identical to SEQ ID NO: 49

SEQ ID NO: 52 - protein, 646 aa, synthetic construct; identical to SEQ ID NO: 50

SEQ ID NO: 53 - protein, 646 aa, synthetic construct
MPMGSLQPLATLYLLGMLVASVLAAENLWVTVYYGVPVWKEAKTTLFCASDAKAYEKKVHNVWATHACVPTDPNPQEMVLKNVTENFNMWKNDMVDQMHEDVISLWDQSLKPCVKLTPLCVTLHCSTYNNTHNISKGMKNCSFNMTTELRDKKQKVNALFYKLDIVQLNKNGRQYRLINCNTSAITQACPKVSFDPIPIHYCAPAGYAILKCNNKTFNGTGPCNNVSTVQCTHGIKPVVSTQLLLNGSLAEGEIIIRSENITNNVKTIIVHLNESVKIECTRPNNKTRKSIRIGPGQTFYATGDVIGDIREAYCNINKSKWNETLQRVSKKLKEYFPHKNITFQPSSGGDLEITTHSFNCGGEFFYCNTSSLFNRTYMANSTDMANSTETNSTRTITIHCRIKQIINMWQEVGRAMYAPPIAGNITCISNITGLLLTRDGGKNNTETFRPGGGNMKDNWRSELYKYKVVKIEPLGVAPTRCKRRVVGRRRRRRAVGIGAVFLGFLGAAGSTMGAASITLTVQARNLLSGIVQQQSNLLRAPEAQQHLLKLTVWGIKQLQARVLAVERYLKDQQLLGIWGCSGKLICCTNVPWNSSWSNRNLSEIWDNMTWLQWDKEISNYTQIIYRLLEESQNQQEKNEQDLLALD

SEQ ID NO: 54 - protein, 646 aa, synthetic construct
MPMGSLQPLATLYLLGMLVASVLAAENLWVTVYYGVPVWKEAKTTLFCASDAKAYEKKVHNVWATHACVPTDPNPQEMVLKNVTENFNMWKNDMVDQMHEDVISLWDQSLKPCVKLTPLCVTLHCSTYNNTHNISKGMKNCSFNMTTELRDKKQKVNALFYKLDIVQLNKNGRQYRLINCNTSAITQACPKVSFDPIPIHYCAPAGYAILKCNNKTFNGTGPCNNVSTVQCTHGIKPVVSTQLLLNGSLAEGEIIIRSENITNNVKTIIVHLNESVKIECTRPNNKTRKSIRIGPGQTFYATGDVIGDIREAYCNISKSKWNETLQRVSKKLKEYFPHKNITFQPSSGGDLEITTHSFNCGGEFFYCNTSSLFNRTYMANSTDMANSTETNSTRTITIHCRIKQIINMWQEVGRAMYAPPIAGNITCISNITGLLLTRDGGKNNTETFRPGGGNMKDNWRSELYKYKVVKIEPLGVAPTRCKRRVVGRRRRRRAVGIGAVFLGFLGAAGSTMGAASITLTVQARNLLSGIVQQQSNLLRAPEAQQHLLKLTVWGIKQLQARVLAVERYLKDQQLLGIWGCSGKLICCTNVPWNSSWSNRNLSEIWDNMTWLQWDKEISNYTQIIYRLLEESQNQQEKNEQDLLALD

SEQ ID NO: 55 - DNA, 1962 bp, synthetic construct
  source 1..1962: mol_type = other DNA
gtcgacgccaccatgcctatgggatctctgcagcctctggccacactgtacctgctgggaatgctggtggcttctgtgctggccgccgagaatctgtgggtcacagtgtactatggcgtgcccgtgtggaaagaggccaagaccacactgttctgtgccagcgacgccaaggcctacgagaagaaagtgcacaacgtgtgggccactcacgcctgcgttcccaccgatcctaatcctcaagagatggtgctgaagaacgtgaccgagaacttcaacatgtggaagaacgacatggtggaccagatgcacgaggacgtgatcagcctgtgggaccagagcctgaagccttgcgtgaagctgacccctctgtgtgtgaccctgcactgcagcacctacaacaacacccacaacatcagcaagggcatgaagaactgcagcttcaatatgaccaccgagctgcgggacaagaagcagaaagtcaacgccctgttctacaagctggacatcgtgcagctgaacaagaacggccggcagtaccggctgatcaactgcaacacaagcgccatcacacaggcttgccccaaggtgtccttcgatcccattcctatccactactgtgcccctgccggctacgccatcctgaagtgcaacaacaagaccttcaacggcacaggcccctgcaacaacgtgtccaccgtgcagtgtacccacggcatcaagccagtggtgtctacccagctgctgctgaatggatctctggccgagggcgagatcatcatcagaagcgagaacatcaccaacaacgtcaagaccatcatcgtccacctgaacgagagcgtgaagatcgagtgcacccggcctaacaacaaaaccagaaagagcatccggatcggccctggccagaccttttatgctactggcgacgtgatcggcgacatcagagaggcctactgcaacatcaacaagagcaagtggaacgagacactgcagcgggtgtccaagaaactgaaagagtacttcccgcacaagaatatcaccttccagcctagctctggcggcgacctggaaatcaccacacacagctttaactgtggcggcgagttcttctactgcaataccagcagcctgttcaaccggacctacatggccaactccaccgatatggccaacagcaccgagacaaacagcacccggaccatcaccatccactgccggatcaagcagatcatcaatatgtggcaagaagtcggcagggctatgtacgcccctcctatcgccggcaacatcacctgtatcagcaatatcaccggcctgctgctcaccagagatggcggcaagaacaacaccgaaaccttcagacccggcggaggcaacatgaaggacaattggagaagcgagctgtacaagtacaaggtggtcaagatcgagcccctgggcgtcgcaccaacacggtgcaagagaagagtcgtgggccgtcgtagaaggcggagagccgttggaattggcgccgtgttcctgggctttctgggagccgctggatctacaatgggcgctgccagcatcaccctgacagtgcaggctagaaatctgctgagcggcattgtgcagcagcagagcaacctgctgagagcccctgaagctcagcagcacctcctgaaactgaccgtgtggggaatcaagcagctgcaggcaagagtgctggcagtggaaagatacctgaaggaccagcagctcctcggaatctggggctgttctggcaagctgatctgctgcaccaacgtgccctggaacagctcctggtccaacagaaacctgagcgagatctgggacaacatgacctggctgcagtgggacaaagagatcagcaactacacccagatcatctaccggctgctggaagagagccagaaccagcaagagaaaaacgagcaggacctgctggccctggactgataaggatcc

SEQ ID NO: 56 - DNA, 1962 bp, synthetic construct
  source 1..1962: mol_type = other DNA
gtcgacgccaccatgcctatgggatctctgcagcctctggccacactgtacctgctgggaatgctggtggcttctgtgctggccgccgagaatctgtgggtcacagtgtactatggcgtgcccgtgtggaaagaggccaagaccacactgttctgtgccagcgacgccaaggcctacgagaagaaagtgcacaacgtgtgggccactcacgcctgcgttcccaccgatcctaatcctcaagagatggtgctgaagaacgtgaccgagaacttcaacatgtggaagaacgacatggtggaccagatgcacgaggacgtgatcagcctgtgggaccagagcctgaagccttgcgtgaagctgacccctctgtgtgtgaccctgcactgcagcacctacaacaacacccacaacatcagcaagggcatgaagaactgcagcttcaatatgaccaccgagctgcgggacaagaagcagaaagtcaacgccctgttctacaagctggacatcgtgcagctgaacaagaacggccggcagtaccggctgatcaactgcaacacaagcgccatcacacaggcttgccccaaggtgtccttcgatcccattcctatccactactgtgcccctgccggctacgccatcctgaagtgcaacaacaagaccttcaacggcacaggcccctgcaacaacgtgtccaccgtgcagtgtacccacggcatcaagccagtggtgtctacccagctgctgctgaatggatctctggccgagggcgagatcatcatcagaagcgagaacatcaccaacaacgtcaagaccatcatcgtccacctgaacgagagcgtgaagatcgagtgcacccggcctaacaacaaaaccagaaagagcatccggatcggccctggccagaccttttatgctactggcgacgtgatcggcgacatcagagaggcctactgcaacatctccaagagcaagtggaacgagacactgcagcgggtgtccaagaaactgaaagagtacttcccgcacaagaatatcaccttccagcctagctctggcggcgacctggaaatcaccacacacagctttaactgtggcggcgagttcttctactgcaataccagcagcctgttcaaccggacctacatggccaactccaccgatatggccaacagcaccgagacaaacagcacccggaccatcaccatccactgccggatcaagcagatcatcaatatgtggcaagaagtcggcagggctatgtacgcccctcctatcgccggcaacatcacctgtatcagcaatatcaccggcctgctgctcaccagagatggcggcaagaacaacaccgaaaccttcagacccggcggaggcaacatgaaggacaattggagaagcgagctgtacaagtacaaggtggtcaagatcgagcccctgggcgtcgcaccaacacggtgcaagagaagagtcgtgggccgtcgtagaaggcggagagccgttggaattggcgccgtgttcctgggctttctgggagccgctggatctacaatgggcgctgccagcatcaccctgacagtgcaggctagaaatctgctgagcggcattgtgcagcagcagagcaacctgctgagagcccctgaagctcagcagcacctcctgaaactgaccgtgtggggaatcaagcagctgcaggcaagagtgctggcagtggaaagatacctgaaggaccagcagctcctcggaatctggggctgttctggcaagctgatctgctgcaccaacgtgccctggaacagctcctggtccaacagaaacctgagcgagatctgggacaacatgacctggctgcagtgggacaaagagatcagcaactacacccagatcatctaccggctgctggaagagagccagaaccagcaagagaaaaacgagcaggacctgctggccctggactgataaggatcc

SEQ ID NO: 57 - DNA, 1962 bp, synthetic construct
  source 1..1962: mol_type = other DNA
gtcgacgccaccatgcctatgggatctctgcagcctctggccacactgtacctgctgggaatgctggtggcttctgtgctggccgccgagaatctgtgggtcacagtgtactatggcgtgcccgtgtggaaagaggccaagaccacactgttctgtgccagcgacgccaaggcctacgagaagaaagtgcacaacgtgtgggccactcacgcctgcgttcccaccgatcctaatcctcaagagatggtgctgaagaacgtgaccgagaacttcaacatgtggaagaacgacatggtggaccagatgcacgaggacgtgatcagcctgtgggaccagagcctgaagccttgcgtgaagctgacccctctgtgtgtgaccctgcactgcagcacctacaacaacacccacaacatcagcaagggcatgaagaactgcagcttcaacgccaccaccgagctgcgggacaagaaacagaaagtgaacgccctgttctacaagctggacatcgtgcagctgaacaagaacggccggcagtaccggctgatcaactgcaacaccagcgtgatcacccaggcctgtcctaaggtgtccttcgatcccattcctatccactactgtgcccctgccggctacgccatcctgaagtgcaacaacaagaccttcaacggcacaggcccctgcaacaacgtgtccaccgtgcagtgtacccacggcatcaagcctgtggtgtctacccagctgctgctgaatggatctctggccgagggcgagatcatcatcagaagcgagaacatcaccaacaacgtcaagaccatcatcgtccacctgaacgagagcgtgaagatcgagtgcacccggcctaacaacaaaacccggaccagcatcagaatcggccctggccagaccttttacgccaccggacaagtgatcggcgacatcagagaggcctactgcaacatcaacaagagcaagtggaacgagacactgcagcgggtgtccaagaagctgaaagagtacttccctcacaagaatatcaccttccagcctagctctggcggcgacctggaaatcaccacacacagcttcaattgtggcggcgagttcttctactgcaatacctccagcctgttcaaccggacctacatggccaactccaccgatatggccaacagcaccgagacaaacagcaccagaaccatcaccatccactgccggatcaagcagatcatcaatatgtggcaagaagtcggcagggctatgtacgcccctcctatcgccggcaacatcacctgtatcagcaatatcaccggcctgctgctcaccagagatggcggcaagaacaacaccgaaaccttcagacccggcggaggcaacatgaaggacaattggagaagcgagctgtacaagtacaaggtggtcaagatcgagcccctgggcgtcgcacccaccaggtgcaaaagaagagtcgtcggaagaaggcggaggcggagagccgttggaattggagcagtgttcctgggctttctgggagccgccggatctacaatgggagctgccagcatgaccctgaccgtgcaggctagaaatctgctgagcggcattgtgcagcagcagagcaacctgctgagagcccctgaagctcagcagcacctcctgaaactgaccgtgtggggaatcaagcagctgcaggcaagagtgctggcagtggaaagatacctgcgggaccagcagctcctcggaatctggggatgtagcggcaagctgatctgctgcaccaacgtgccctggaacagctcctggtccaacagaaacctgagcgagatctgggacaacatgacctggctgcagtgggacaaagagatcagcaactacacccagatcatctacggactgctggaagagagccagaaccagcaagagaagaacgagcaggacctgctggccctggactgataaggatcc

SEQ ID NO: 58 - DNA, 1962 bp, synthetic construct
  source 1..1962: mol_type = other DNA
gtcgacgccaccatgcctatgggatctctgcagcctctggccacactgtacctgctgggaatgctggtggcttctgtgctggccgccgagaatctgtgggtcacagtgtactatggcgtgcccgtgtggaaagaggccaagaccacactgttctgtgccagcgacgccaaggcctacgagaagaaagtgcacaacgtgtgggccactcacgcctgcgttcccaccgatcctaatcctcaagagatggtgctgaagaacgtgaccgagaacttcaacatgtggaagaacgacatggtggaccagatgcacgaggacgtgatcagcctgtgggaccagagcctgaagccttgcgtgaagctgacccctctgtgtgtgaccctgcactgcagcacctacaacaacacccacaacatcagcaagggcatgaagaactgcagcttcaacgccaccaccgagctgcgggacaagaaacagaaagtgaacgccctgttctacaagctggacatcgtgcagctgaacaagaacggccggcagtaccggctgatcaactgcaacaccagcgtgatcacccaggcctgtcctaaggtgtccttcgatcccattcctatccactactgtgcccctgccggctacgccatcctgaagtgcaacaacaagaccttcaacggcacaggcccctgcaacaacgtgtccaccgtgcagtgtacccacggcatcaagcctgtggtgtctacccagctgctgctgaatggatctctggccgagggcgagatcatcatcagaagcgagaacatcaccaacaacgtcaagaccatcatcgtccacctgaacgagagcgtgaagatcgagtgcacccggcctaacaacaaaacccggaccagcatcagaatcggccctggccagaccttttacgccaccggacaagtgatcggcgacatcagagaggcctactgcaacatctccaagagcaagtggaacgagacactgcagcgggtgtccaagaagctgaaagagtacttccctcacaagaatatcaccttccagcctagctctggcggcgacctggaaatcaccacacacagcttcaattgtggcggcgagttcttctactgcaatacctccagcctgttcaaccggacctacatggccaactccaccgatatggccaacagcaccgagacaaacagcaccagaaccatcaccatccactgccggatcaagcagatcatcaatatgtggcaagaagtcggcagggctatgtacgcccctcctatcgccggcaacatcacctgtatcagcaatatcaccggcctgctgctcaccagagatggcggcaagaacaacaccgaaaccttcagacccggcggaggcaacatgaaggacaattggagaagcgagctgtacaagtacaaggtggtcaagatcgagcccctgggcgtcgcacccaccaggtgcaaaagaagagtcgtcggaagaaggcggaggcggagagccgttggaattggagcagtgttcctgggctttctgggagccgccggatctacaatgggagctgccagcatgaccctgaccgtgcaggctagaaatctgctgagcggcattgtgcagcagcagagcaacctgctgagagcccctgaagctcagcagcacctcctgaaactgaccgtgtggggaatcaagcagctgcaggcaagagtgctggcagtggaaagatacctgcgggaccagcagctcctcggaatctggggatgtagcggcaagctgatctgctgcaccaacgtgccctggaacagctcctggtccaacagaaacctgagcgagatctgggacaacatgacctggctgcagtgggacaaagagatcagcaactacacccagatcatctacggactgctggaagagagccagaaccagcaagagaagaacgagcaggacctgctggccctggactgataaggatcc

SEQ ID NO: 59 - DNA, 1962 bp, synthetic construct
  source 1..1962: mol_type = other DNA
gtcgacgccaccatgcctatgggatctctgcagcctctggccacactgtacctgctgggaatgctggtggcttctgtgctggccgccgagaatctgtgggtcacagtgtactatggcgtgcccgtgtggaaagaggccaagaccacactgttctgtgccagcgacgccaaggcctacgagaagaaagtgcacaacgtgtgggccactcacgcctgcgttcccaccgatcctaatcctcaagagatggtgctgaagaacgtgaccgagaacttcaacatgtggaagaacgacatggtggaccagatgcacgaggacgtgatcagcctgtgggaccagagcctgaagccttgcgtgaagctgacccctctgtgtgtgaccctgcactgcagcacctacaacaacacccacaacatcagcaagggcatgaagaactgcagcttcaatatgaccaccgagctgcgggacaagaagcagaaagtcaacgccctgttctacaagctggacatcgtgcagctgaacaagaacggccggcagtaccggctgatcaactgcaacacaagcgccatcacacaggcttgccccaaggtgtccttcgatcccattcctatccactactgtgcccctgccggctacgccatcctgaagtgcaacaacaagaccttcaacggcacaggcccctgcaacaacgtgtccaccgtgcagtgtacccacggcatcaagccagtggtgtctacccagctgctgctgaatggatctctggccgagggcgagatcatcatcagaagcgagaacatcaccaacaacgtcaagaccatcatcgtccacctgaacgagagcgtgaagatcgagtgcacccggcctaacaacaaaaccagaaagagcatccggatcggccctggccagaccttttatgctactggcgacgtgatcggcgacatcagagaggcctactgcaacatcaacaagagcaagtggaacgagacactgcagcgggtgtccaagaaactgaaagagtacttcccgcacaagaatatcaccttccagcctagctctggcggcgacctggaaatcaccacacacagctttaactgtggcggcgagttcttctactgcaataccagcagcctgttcaaccggacctacatggccaactccaccgatatggccaacagcaccgagacaaacagcacccggaccatcaccatccactgccggatcaagcagatcatcaatatgtggcaagaagtcggcagggctatgtacgcccctcctatcgccggcaacatcacctgtatcagcaatatcaccggcctgctgctcaccagagatggcggcaagaacaacaccgaaaccttcagacccggcggaggcaacatgaaggacaattggagaagcgagctgtacaagtacaaggtggtcaagatcgagcccctgggcgtcgcacccaccaggtgcaaaagaagagtcgtcggaagaaggcggaggcggagagccgttggaattggagctgtgttcctgggctttctgggagccgccggatctacaatgggagctgccagcatgaccctgaccgtgcaggctagaaatctgctgagcggcattgtgcagcagcagagcaacctgctgagagcccctgaagctcagcagcacctcctgaaactgaccgtgtggggaatcaagcagctgcaggcaagagtgctggcagtggaaagatacctgcgggaccagcagctcctcggaatctggggatgtagcggcaagctgatctgctgcaccaacgtgccctggaacagctcctggtccaacagaaacctgagcgagatctgggacaacatgacctggctgcagtgggacaaagagatcagcaactacacccagatcatctacggactgctggaagagagccagaaccagcaagagaagaacgagcaggacctgctggccctggactgataaggatcc

SEQ ID NO: 60 - DNA, 1962 bp, synthetic construct
  source 1..1962: mol_type = other DNA
gtcgacgccaccatgcctatgggatctctgcagcctctggccacactgtacctgctgggaatgctggtggcttctgtgctggccgccgagaatctgtgggtcacagtgtactatggcgtgcccgtgtggaaagaggccaagaccacactgttctgtgccagcgacgccaaggcctacgagaagaaagtgcacaacgtgtgggccactcacgcctgcgttcccaccgatcctaatcctcaagagatggtgctgaagaacgtgaccgagaacttcaacatgtggaagaacgacatggtggaccagatgcacgaggacgtgatcagcctgtgggaccagagcctgaagccttgcgtgaagctgacccctctgtgtgtgaccctgcactgcagcacctacaacaacacccacaacatcagcaagggcatgaagaactgcagcttcaatatgaccaccgagctgcgggacaagaagcagaaagtcaacgccctgttctacaagctggacatcgtgcagctgaacaagaacggccggcagtaccggctgatcaactgcaacacaagcgccatcacacaggcttgccccaaggtgtccttcgatcccattcctatccactactgtgcccctgccggctacgccatcctgaagtgcaacaacaagaccttcaacggcacaggcccctgcaacaacgtgtccaccgtgcagtgtacccacggcatcaagccagtggtgtctacccagctgctgctgaatggatctctggccgagggcgagatcatcatcagaagcgagaacatcaccaacaacgtcaagaccatcatcgtccacctgaacgagagcgtgaagatcgagtgcacccggcctaacaacaaaaccagaaagagcatccggatcggccctggccagaccttttatgctactggcgacgtgatcggcgacatcagagaggcctactgcaacatctccaagagcaagtggaacgagacactgcagcgggtgtccaagaaactgaaagagtacttcccgcacaagaatatcaccttccagcctagctctggcggcgacctggaaatcaccacacacagctttaactgtggcggcgagttcttctactgcaataccagcagcctgttcaaccggacctacatggccaactccaccgatatggccaacagcaccgagacaaacagcacccggaccatcaccatccactgccggatcaagcagatcatcaatatgtggcaagaagtcggcagggctatgtacgcccctcctatcgccggcaacatcacctgtatcagcaatatcaccggcctgctgctcaccagagatggcggcaagaacaacaccgaaaccttcagacccggcggaggcaacatgaaggacaattggagaagcgagctgtacaagtacaaggtggtcaagatcgagcccctgggcgtcgcacccaccaggtgcaaaagaagagtcgtcggaagaaggcggaggcggagagccgttggaattggagctgtgttcctgggctttctgggagccgccggatctacaatgggagctgccagcatgaccctgaccgtgcaggctagaaatctgctgagcggcattgtgcagcagcagagcaacctgctgagagcccctgaagctcagcagcacctcctgaaactgaccgtgtggggaatcaagcagctgcaggcaagagtgctggcagtggaaagatacctgcgggaccagcagctcctcggaatctggggatgtagcggcaagctgatctgctgcaccaacgtgccctggaacagctcctggtccaacagaaacctgagcgagatctgggacaacatgacctggctgcagtgggacaaagagatcagcaactacacccagatcatctacggactgctggaagagagccagaaccagcaagagaagaacgagcaggacctgctggccctggactgataaggatcc

SEQ ID NO: 61 - protein, 650 aa, synthetic construct
VDATMPMGSLQPLATLYLLGMLVASVLAAENLWVTVYYGVPVWKEAKTTLFCASDAKAYEKKVHNVWATHACVPTDPNPQEMVLKNVTENFNMWKNDMVDQMHEDVISLWDQSLKPCVKLTPLCVTLHCSTYNNTHNISKGMKNCSFNMTTELRDKKQKVNALFYKLDIVQLNKNGRQYRLINCNTSAITQACPKVSFDPIPIHYCAPAGYAILKCNNKTFNGTGPCNNVSTVQCTHGIKPVVSTQLLLNGSLAEGEIIIRSENITNNVKTIIVHLNESVKIECTRPNNKTRKSIRIGPGQTFYATGDVIGDIREAYCNINKSKWNETLQRVSKKLKEYFPHKNITFQPSSGGDLEITTHSFNCGGEFFYCNTSSLFNRTYMANSTDMANSTETNSTRTITIHCRIKQIINMWQEVGRAMYAPPIAGNITCISNITGLLLTRDGGKNNTETFRPGGGNMKDNWRSELYKYKVVKIEPLGVAPTRCKRRVVGRRRRRRAVGIGAVFLGFLGAAGSTMGAASITLTVQARNLLSGIVQQQSNLLRAPEAQQHLLKLTVWGIKQLQARVLAVERYLKDQQLLGIWGCSGKLICCTNVPWNSSWSNRNLSEIWDNMTWLQWDKEISNYTQIIYRLLEESQNQQEKNEQDLLALD

SEQ ID NO: 62 - protein, 650 aa, synthetic construct
VDATMPMGSLQPLATLYLLGMLVASVLAAENLWVTVYYGVPVWKEAKTTLFCASDAKAYEKKVHNVWATHACVPTDPNPQEMVLKNVTENFNMWKNDMVDQMHEDVISLWDQSLKPCVKLTPLCVTLHCSTYNNTHNISKGMKNCSFNMTTELRDKKQKVNALFYKLDIVQLNKNGRQYRLINCNTSAITQACPKVSFDPIPIHYCAPAGYAILKCNNKTFNGTGPCNNVSTVQCTHGIKPVVSTQLLLNGSLAEGEIIIRSENITNNVKTIIVHLNESVKIECTRPNNKTRKSIRIGPGQTFYATGDVIGDIREAYCNISKSKWNETLQRVSKKLKEYFPHKNITFQPSSGGDLEITTHSFNCGGEFFYCNTSSLFNRTYMANSTDMANSTETNSTRTITIHCRIKQIINMWQEVGRAMYAPPIAGNITCISNITGLLLTRDGGKNNTETFRPGGGNMKDNWRSELYKYKVVKIEPLGVAPTRCKRRVVGRRRRRRAVGIGAVFLGFLGAAGSTMGAASITLTVQARNLLSGIVQQQSNLLRAPEAQQHLLKLTVWGIKQLQARVLAVERYLKDQQLLGIWGCSGKLICCTNVPWNSSWSNRNLSEIWDNMTWLQWDKEISNYTQIIYRLLEESQNQQEKNEQDLLALD

SEQ ID NO: 63 - protein, 650 aa, synthetic construct; identical to SEQ ID NO: 61

SEQ ID NO: 64 - protein, 650 aa, synthetic construct; identical to SEQ ID NO: 62

SEQ ID NO: 65 - protein, 650 aa, synthetic construct; identical to SEQ ID NO: 61

SEQ ID NO: 66 - protein, 650 aa, synthetic construct; identical to SEQ ID NO: 62

SEQ ID NO: 67 - protein, 845 aa, synthetic construct
MRVMGIQRNYPQWWIWSMLGFWMLMICNGMWVTVYYGVPVWKEAKTTLFCASDAKAYEKEVHNVWATHACVPTDPNPQEMVLKNVTENFNMWKNDMVDQMHEDVISLWDQSLKPCVKLTPLCVTLDCSTYNNTHNISKGMKNCSFNMTTELRDKRRKVNALFYKLDIVQLNKNGRQYRLINCNTSAITQACPKVSFDPIPIHYCAPAGYAILKCNNKTFNGTGPCNNVSTVQCTHGIKPVVSTQLLLNGSLAEGEIIIRSENITNNVKTIIVHLNESVKIECTRPNNKTRKSIRIGPGQTFYATGDVIGDIREAYCNISKSKWNETLQRVSKKLKEYFPHKNITFQPSSGGDLEITTHSFNCGGEFFYCNTSSLFNRTYMANSTDMANSTETNSTRTITIHCRIKQIINMWQEVGRAMYAPPIAGNITCISNITGLLLTRDGGKNNTETFRPGGGNMKDNWRSELYKYKVVEVKPLGVAPTNARRRVVEREKRAVGMGAVFLGFLGAAGSTMGAASITLTVQARQLLSGIVQQQSNLLKAIEAQQHMLKLTVWGIKQLQARVLALERYLKDQQLLGMWGCSGKLICTTNVYWNSSWSNKTYGDIWDNMTWMQWDREISNYTEIIYRLLEESQNQQEKNEQDLLALDRWNSLWNWFNITNWLWYIKIFIMIVGGLIGLRIIFAVLSLVNRVRQGYSPLSFQTLIPSPRGPDRPGRIEEGGGEQDRNRSTRLVSGFLALVWDDLRSLCLFIYHRLRDFILIAARAGELLGRSSLKGLRRGWEALKYLGSLVQYWGLELKRSAISLLDTLAIAVGEGTDRILEFVLGICRAIRHIPTRIRQGFETALL

SEQ ID NO: 68 - DNA, 2537 bp, synthetic construct
  source 1..2537: mol_type = other DNA
atgcgagtgatggggattcagagaaactaccctcagtggtggatttggagtatgctgggattttggatgctgatgatttgtaatgggatgtgggtgaccgtgtactatggcgtgcccgtgtggaaggaggccaagaccacactgttctgcgccagcgacgccaaggcctacgagaaggaggtgcacaacgtgtgggccacacacgcctgcgtgccaaccgatccaacccccaggagatggtgctgaagaatgtgaccgagaactttaatatgtggaagaatgacatggtggatcagatgcacgaggacgtgatcagcctgtgggatcagtccctgaagccctgcgtgaagctgacacctctgtgcgtgaccctggactgttccacatataacaatacccacaacatctctaagggcatgaagaattgtagcttcaacatgaccacagagctgagggacaagaggcggaaagtgaatgccctgttttacaagctggatatcgtgcagctgaacaagaatggccgccagtatcggctgatcaactgcaatacatctgccatcacccaggcctgtcccaaggtgagcttcgaccctatcccaatccactactgcgcccctgccggctatgccatcctgaagtgtaacaacaagaccttcaacggcaccggcccatgcaacaacgtgagcacagtgcagtgtacccacggcatcaagcccgtggtgagcacacagcrgctgctgaatggctccctggccgagggcgagatcatcatccggtctgagaacatcacaaataatgtgaagaccatcatcgtgcacctgaatgagtctgtgaagatcgagtgcaccagacctaacaataagacccgcaagagcatcaggatcggaccaggacagacattctacgccaccggcgacgtcatcggcgatatccgggaggcctattgtaacatctctaagtccaagtggaacgagacactgcagagagtgtctaagaagctgaaggagtacttcccacacaagaatatcacctttcagccaagctccggaggcgacctggagatcaccacacactctttcaactgcggcggcgagttcttttactgtaatacctctagcctgtttaaccggacatatatggccaatagcaccgatatggccaattctaccgagacaaacagcaccagaacaatcaccatccactgcaggatcaagcagatcatcaacatgtggcaggaagtgggcagagccatgtatgccccccctatcgccggcaacatcacctgtatcagcaatatcacaggcctgctgctgaccagagacggcggcaagaacaatacagagacattccggcccggcggcggcaatatgaaggataactggcgctccgagctgtacaagtataaggtggtggaggtgaagcctctgggagtggcaccaacaaacgcacggagaagggtggtggagagagagaagagggcagtgggaatgggagccgtgttcctgggctttctgggagcagcaggcagcaccatgggagcagcctccatcacactgaccgtgcaggccagacagctgcrgtccggcatcgtgcagcagcagtctaacctgctgaaggccatcgaggcccagcagcacatgctgaagctgaccgtgtggggcatcaagcagctgcaggcacgcgtgctggccctggagcggtacctgaaggaccagcagctgctgggaatgtggggatgctccggcaagctgatctgtaccacaaacgtgtactggaactcctcrtggtctaacaagacatatggcgacatctgggataatatgacctggatgcagtgggatcgggagatcagcaactacacagagatcatctatagactgctggaggagtcccagaatcagcaggagaagaacgagcaggacctgctggccctggataggtggaatagcctgtggaactggttcaatatcaccaactggctgtggtacatcaagatctttatcatgatcgtgggcggcctgatcggcctgcgcatcatcttcgccgtgctgagcctggtgaacagagtgaggcagggctattctcctctgagctttcagacactgatcccatcccctagaggaccagacaggccaggacggatcgaggagggaggaggagagcaggatcgcaatcggtccaccaggctggtgtctggcttcctggccctggtgtgggacgatctgcgcagcctgtgcctgttcatctaccacagactgagggactttatcctgatcgcagcaagggcaggagagctgctgggccggagctccctgaagggcctgcgccggggctgggaggccctgaagtacctgggctccctggtgcagtattggggcctggagctgaagaggtccgccatctctctgctggacacactggcaatcgcagtgggagagggaaccgatcgcatcctggagtttgtgctgggcatcrgccgggcaatccgccacatcccaacacgcatccgccaggggtttgagaccgcactgctgtaa

SEQ ID NO: 69 - DNA, 1962 bp, synthetic construct
  source 1..1962: mol_type = other DNA
atgcccatgggcagcctgcagcccctggccaccctgtacctgctgggcatgctggtggctagcgtgctggccgccgagaacctgtgggtgaccgtctactatggcgtgcccgtctggaaggaagccaaaaccacactgttctgcgctagcgacgctaaggcatacgagaaaaaagtgcacaatgtctgggctactcatgcatgcgtgcctaccgatccaaatccccaggagatggtgctgaagaacgtcacagaaaactttaatatgtggaagaacgacatggtggatcagatgcacgaggacgtgatcagcctgtgggatcagtccctgaagccatgcgtgaaactgactcccctgtgcgtcaccctgaactgtactaatgccaccgcttccaacagctccatcattgaggggatgaagaactgttctttcaatatcactaccgagctgcgcgacaagcgagaaaagaaaaatgccctgttttacaaactggacatcgtgcagctggatggcaactctagtcagtatagactgattaactgcaatacaagcgtgatcactcaggcatgtccaaaggtcagtttcgatcctattccaatccactactgcgcacccgccggatatgctatcctgaagtgtaacaacaagaccttcaccggcactgggccttgcaacaacgtgagcaccgtccagtgtacacatggcattaagccagtggtcagcacccagctgctgctgaacggcagcctggcagagggcgaaatcattatccgcagcgagaacatcacaaataatgtgaagactatcatcgtccacctgaacgagagcgtgaagattgaatgcacacggcccaacaacaagaccaggacatccattcgcatcggacctggccagtggttctacgctactggccaggtcatcggggacatcagagaggcctattgtaacatcaatgagtcaaagtggaatgaaactctgcagagggtgagcaagaaactgaaggaatacttccctcacaaaaacatcacctttcagccatcaagcggcggggacctggagattacaactcattctttcaattgcggaggcgaattcttttactgtaacacctcctctctgtttaatcgcacatatatggctaacagtactgatatggcaaactctactgagaccaatagtacacgaactattaccatccattgccggatcaagcagattatcaacatgtggcaggaagtggggcgggccatgtatgctccccctattgcaggaaatattacctgtatcagcaacattaccggcctgctgctgacaagagacgggggaaagaacaatacagagacttttaggcctggcgggggaaacatgaaagataattggcgctccgagctgtacaagtataaagtggtcaagatcgaaccactgggagtggcacctacccgatgtaaacggagagtggtcggaaggcgccgacggagaagggcagtgggaatcggagccgtcttcctgggctttctgggagcagctggcagcacaatgggagcagcctctatgaccctgacagtgcaggctcgaaatctgctgagtgggatcgtgcagcagcagtcaaacctgctgcgagcaccagaggcacagcagcatctgctgaagctgaccgtgtggggcatcaagcagctgcaggccagagtgctggctgtcgaacggtacctgagagatcagcagctgctgggaatctggggatgcagcggaaagctgatttgctgtacaaacgtgccctggaatagttcatggtcaaacaggaatctgagcgagatctgggacaatatgacctggctgcagtgggataaggaaatcagtaactacacacagatcatctatggcctgctggaggaatcacagaaccagcaggagaaaaatgaacaggacctgctggccctggatctgcctagcaccggatgatga

SEQ ID NO: 70 - DNA, 1992 bp, synthetic construct
  source 1..1992: mol_type = other DNA
atgcccatgggcagcctgcagcccctggccaccctgtacctgctgggcatgctggtggctagcgtgctggccggcgggggcgggggcggcgggggcgggggcggcgggggcgggggcgccgagaacctgtgggtgaccgtctactatggcgtgcccgtctggaaggaagccaaaaccacactgttctgcgctagcgacgctaaggcatacgagaaaaaagtgcacaatgtctgggctactcatgcatgcgtgcctaccgatccaaatccccaggagatggtgctgaagaacgtcacagaaaactttaatatgtggaagaacgacatggtggatcagatgcacgaggacgtgatcagcctgtgggatcagtccctgaagccatgcgtgaaactgactcccctgtgcgtcaccctgaactgtactaatgccaccgcttccaacagctccatcattgaggggatgaagaactgttctttcaatatcactaccgagctgcgcgacaagcgagaaaagaaaaatgccctgttttacaaactggacatcgtgcagctggatggcaactctagtcagtatagactgattaactgcaatacaagcgtgatcactcaggcatgtccaaaggtcagtttcgatcctattccaatccactactgcgcacccgccggatatgctatcctgaagtgtaacaacaagaccttcaccggcactgggccttgcaacaacgtgagcaccgtccagtgtacacatggcattaagccagtggtcagcacccagctgctgctgaacggcagcctggcagagggcgaaatcattatccgcagcgagaacatcacaaataatgtgaagactatcatcgtccacctgaacgagagcgtgaagattgaatgcacacggcccaacaacaagaccaggacatccattcgcatcggacctggccagtggttctacgctactggccaggtcatcggggacatcagagaggcctattgtaacatcaatgagtcaaagtggaatgaaactctgcagagggtgagcaagaaactgaaggaatacttccctcacaaaaacatcacctttcagccatcaagcggcggggacctggagattacaactcattctttcaattgcggaggcgaattcttttactgtaacacctcctctctgtttaatcgcacatatatggctaacagtactgatatggcaaactctactgagaccaatagtacacgaactattaccatccattgccggatcaagcagattatcaacatgtggcaggaagtggggcgggccatgtatgctccccctattgcaggaaatattacctgtatcagcaacattaccggcctgctgctgacaagagacgggggaaagaacaatacagagacttttaggcctggcgggggaaacatgaaagataattggcgctccgagctgtacaagtataaagtggtcaagatcgaaccactgggagtggcacctacccgatgtaaacggagagtggtcggaaggcgccgacggagaagggcagtgggaatcggagccgtcttcctgggctttctgggagcagctggcagcacaatgggagcagcctctatgaccctgacagtgcaggctcgaaatctgctgagtgggatcgtgcagcagcagtcaaacctgctgcgagcaccagaggcacagcagcatctgctgaagctgaccgtgtggggcatcaagcagctgcaggccagagtgctggctgtcgaacggtacctgagagatcagcagctgctgggaatctggggatgcagcggaaagctgatttgctgtacaaacgtgccctggaatagttcatggtcaaacaggaatctgagcgagatctgggacaatatgacctggctgcagtgggataaggaaatcagtaactacacacagatcatctatggcctgctggaggaatcacagaaccagcaggagaaaaatgaacaggacctgctggccctggattgatga

SEQ ID NO: 71 - DNA, 1989 bp, synthetic construct
  source 1..1989: mol_type = other DNA
atgcccatgggctccctgcagcccctggccaccctgtacctgctgggcatgctggtggcctccgtgctggccggcgggggcgggggcggcgggggcgggggcggcgggggcgggggcgccgagaacctgtgggtgaccgtgtactacggcgtgcccgtgtggaaggaggccaagaccaccctgttctgcgcctccgacgccaaggcctacgagaagaaggtgcacaacgtgtgggccacccacgcctgcgtgcccaccgaccccaacccccaggagatggtgctgaagaacgtgaccgagaacttcaacatgtggaagaacgacatggtggaccagatgcacgaggacgtgatctccctgtgggaccagtccctgaagccctgcgtgaagctgacccccctgtgcgtgaccctgaactgcaccaacgccaccgcctccaactcctccatcatcgagggcatgaagaactgctccttcaacatcaccaccgagctgcgcgacaagcgcgagaagaagaacgccctgttctacaagctggacatcgtgcagctggacggcaactcctcccagtaccgcctgatcaactgcaacacctccgtgatcacccaggcctgccccaaggtgtccttcgaccccatccccatccactactgcgcccccgccggctacgccatcctgaagtgcaacaacaagaccttcaccggcaccggcccctgcaacaacgtgtccaccgtgcagtgcacccacggcatcaagcccgtggtgtccacccagctgctgctgaacggctccctggccgagggcgagatcatcatccgctccgagaacatcaccaagaacgtgaagaccatcatcgtgcacctgaacgagtccgtgaagatcgagtgcacccgccccaacaacaagacccgcacctccatccgcatcggccccggccagtggttctacgccaccggccaggtgatcggcgacatccgcgaggcctactgcaacatcaacgagtccaagtggaacgagaccctgcagcgcgtgtccaagaagctgaaggagtacttcccccacaagaacatcaccttccagccctcctccggcggcgacctggagatcaccacccactccttcaactgcggcggcgagttcttctactgcaacacctcctccctgttcaaccgcacctacatggccaactccaccgacatggccaactccaccgagaccaactccacccgcaccatcaccatccactgccgcatcaagcagatcatcaacatgtggcaggaggtgggccgcgccatgtacgccccccccatcgccggcaacatcacctgcatctccaacatcaccggcctgctgctgacccgcgacggcggcaagaacaacaccgagaccttccgccccggcggcggcaacatgaaggacaactggcgctccgagctgtacaagtacaaggtggtgaagatcgagcccctgggcgtggcccccacccgctgcaagcgccgcgtggtgggccgccgccgccgccgccgcgccgtgggcatcggcgccgtgttcctgggcttcctgggcgccgccggctccaccatgggcgccgcctccatgaccctgaccgtgcaggcccgcaacctgctgtccggcatcgtgcagcagcagtccaacctgctgcgcgcccccgaggcccagcagcacctgctgaagctgaccgtgtggggcatcaagcagctgcaggcccgcgtgctggccgtggagcgctacctgcgcgaccagcagctgctgggcatctggggctgctccggcaagctgatctgctgcaccaacgtgccctggaactcctcctggtccaaccgcaacctgtccgagatctgggacaacatgacctggctgcagtgggacaaggagatctccaactacacccagatcatctacggcctgctggaggagtcccagaaccagcaggagaagaacgagcaggacctgctggccctggactag

SEQ ID NO: 72 - protein, 662 aa, synthetic construct
MPMGSLQPLATLYLLGMLVASVLAGGGGGGGGGGGGGGGAENLWVTVYYGVPVWKEAKTTLFCASDAKAYEKKVHNVWATHACVPTDPNPQEMVLKNVTENFNMWKNDMVDQMHEDVISLWDQSLKPCVKLTPLCVTLNCTNATASNSSIIEGMKNCSFNITTELRDKREKKNALFYKLDIVQLDGNSSQYRLINCNTSVITQACPKVSFDPIPIHYCAPAGYAILKCNNKTFTGTGPCNNVSTVQCTHGIKPVVSTQLLLNGSLAEGEIIIRSENITKNVKTIIVHLNESVKIECTRPNNKTRTSIRIGPGQWFYATGQVIGDIREAYCNINESKWNETLQRVSKKLKEYFPHKNITFQPSSGGDLEITTHSFNCGGEFFYCNTSSLFNRTYMANSTDMANSTETNSTRTITIHCRIKQIINMWQEVGRAMYAPPIAGNITCISNITGLLLTRDGGKNNTETFRPGGGNMKDNWRSELYKYKVVKIEPLGVAPTRCKRRVVGRRRRRRAVGIGAVFLGFLGAAGSTMGAASMTLTVQARNLLSGIVQQQSNLLRAPEAQQHLLKLTVWGIKQLQARVLAVERYLRDQQLLGIWGCSGKLICCTNVPWNSSWSNRNLSEIWDNMTWLQWDKEISNYTQIIYGLLEESQNQQEKNEQDLLALD

SEQ ID NO: 73 - DNA, 1959 bp, synthetic construct
  source 1..1959: mol_type = other DNA
atgcccatgggctccctgcagcccctggccaccctgtacctgctgggcatgctggtggcctccgtgctggccgccgagaacctgtgggtgaccgtgtactacggcgtgcccgtgtggaaggaggccaagaccaccctgttctgcgcctccgacgccaaggcctacgagaagaaggtgcacaacgtgtgggccacccacgcctgcgtgcccaccgaccccaacccccaggagatggtgctgaagaacgtgaccgagaacttcaacatgtggaagaacgacatggtggaccagatgcacgaggacgtgatctccctgtgggaccagtccctgaagccctgcgtgaagctgacccccctgtgcgtgaccctgaactgcaccaacgccaccgcctccaactcctccatcatcgagggcatgaagaactgctccttcaacatcaccaccgagctgcgcgacaagcgcgagaagaagaacgccctgttctacaagctggacatcgtgcagctggacggcaactcctcccagtaccgcctgatcaactgcaacacctccgtgatcacccaggcctgccccaaggtgtccttcgaccccatccccatccactactgcgcccccgccggctacgccatcctgaagtgcaacaacaagaccttcaccggcaccggcccctgcaacaacgtgtccaccgtgcagtgcacccacggcatcaagcccgtggtgtccacccagctgctgctgaacggctccctggccgagggcgagatcatcatccgctccgagaacatcaccaagaacgtgaagaccatcatcgtgcacctgaacgagtccgtgaagatcgagtgcacccgccccaacaacaagacccgcacctccatccgcatcggccccggccagtggttctacgccaccggccaggtgatcggcgacatccgcgaggcctactgcaacatcaacgagtccaagtggaacgagaccctgcagcgcgtgtccaagaagctgaaggagtacttcccccacaagaacatcaccttccagccctcctccggcggcgacctggagatcaccacccactccttcaactgcggcggcgagttcttctactgcaacacctcctccctgttcaaccgcacctacatggccaactccaccgacatggccaactccaccgagaccaactccacccgcaccatcaccatccactgccgcatcaagcagatcatcaacatgtggcaggaggtgggccgcgccatgtacgccccccccatcgccggcaacatcacctgcatctccaacatcaccggcctgctgctgacccgcgacggcggcaagaacaacaccgagaccttccgccccggcggcggcaacatgaaggacaactggcgctccgagctgtacaagtacaaggtggtgaagatcgagcccctgggcgtggcccccacccgctgcaagcgccgcgtggtgggccgccgccgccgccgccgcgccgtgggcatcggcgccgtgttcctgggcttcctgggcgccgccggctccaccatgggcgccgcctccatgaccctgaccgtgcaggcccgcaacctgctgtccggcatcgtgcagcagcagtccaacctgctgcgcgcccccgaggcccagcagcacctgctgaagctgaccgtgtggggcatcaagcagctgcaggcccgcgtgctggccgtggagcgctacctgcgcgaccagcagctgctgggcatctggggctgctccggcaagctgatctgctgcaccaacgtgccctggaactcctcctggtccaaccgcaacctgtccgagatctgggacaacatgacctggctgcagtgggacaaggagatctccaactacacccagatcatctacggcctgctggaggagtcccagaaccagcaggagaagaacgagcaggacctgctggccctggacctgcctagcaccggatag

SEQ ID NO: 74 - protein, 652 aa, synthetic construct
MPMGSLQPLATLYLLGMLVASVLAAENLWVTVYYGVPVWKEAKTTLFCASDAKAYEKKVHNVWATHACVPTDPNPQEMVLKNVTENFNMWKNDMVDQMHEDVISLWDQSLKPCVKLTPLCVTLNCTNATASNSSIIEGMKNCSFNITTELRDKREKKNALFYKLDIVQLDGNSSQYRLINCNTSVITQACPKVSFDPIPIHYCAPAGYAILKCNNKTFTGTGPCNNVSTVQCTHGIKPVVSTQLLLNGSLAEGEIIIRSENITKNVKTIIVHLNESVKIECTRPNNKTRTSIRIGPGQWFYATGQVIGDIREAYCNINESKWNETLQRVSKKLKEYFPHKNITFQPSSGGDLEITTHSFNCGGEFFYCNTSSLFNRTYMANSTDMANSTETNSTRTITIHCRIKQIINMWQEVGRAMYAPPIAGNITCISNITGLLLTRDGGKNNTETFRPGGGNMKDNWRSELYKYKVVKIEPLGVAPTRCKRRVVGRRRRRRAVGIGAVFLGFLGAAGSTMGAASMTLTVQARNLLSGIVQQQSNLLRAPEAQQHLLKLTVWGIKQLQARVLAVERYLRDQQLLGIWGCSGKLICCTNVPWNSSWSNRNLSEIWDNMTWLQWDKEISNYTQIIYGLLEESQNQQEKNEQDLLALDLPSTG

SEQ ID NO: 75 - protein, 7 aa, synthetic construct
  VARIANT 3: note = X can be any amino acid
  VARIANT 6: note = X can be any amino acid
  VARIANT 7: note = X can be any amino acid
LPXTGXX

SEQ ID NO: 76 - protein, 8 aa, synthetic construct
  VARIANT 7: note = X can be any amino acid
  VARIANT 6: note = X can be any amino acid
  VARIANT 8: note = X can be any amino acid
GGGGGXXX

SEQ ID NO: 77 - protein, 12 aa, synthetic construct
  VARIANT 12: note = X can be any amino acid
  VARIANT 11: note = X can be any amino acid
  VARIANT 10: note = X can be any amino acid
  VARIANT 3: note = X can be any amino acid
LPXTGGGGGXXX

SEQ ID NO: 78 - protein, 10 aa, synthetic construct
  VARIANT 1: note = X can be any amino acid
  VARIANT 2: note = X can be any amino acid
  VARIANT 3: note = X can be any amino acid
  VARIANT 6: note = X can be any amino acid
  VARIANT 9: note = X can be any amino acid
  VARIANT 10: note = X can be any amino acid
XXXLPXTGXX

SEQ ID NO: 79 - protein, 5 aa, synthetic construct
GGGGG

SEQ ID NO: 80 - protein, 12 aa, synthetic construct
  VARIANT 1: note = X can be any amino acid
  VARIANT 2: note = X can be any amino acid
  VARIANT 3: note = X can be any amino acid
  VARIANT 6: note = X can be any amino acid
XXXLPXTGGGGG

SEQ ID NO: 81 - protein, 815 aa, synthetic construct
MPMGSLQPLATLYLLGMLVASVLAAENLWVTVYYGVPVWKEAKTTLFCASDAKAYEKKVHNVWATHACVPTDPNPQEMVLKNVTENFNMWKNDMVDQMHEDVISLWDQSLKPCVKLTPLCVTLNCTNATASNSSIIEGMKNCSFNITTELRDKREKKNALFYKLDIVQLDGNSSQYRLINCNTSVITQACPKVSFDPIPIHYCAPAGYAILKCNNKTFTGTGPCNNVSTVQCTHGIKPVVSTQLLLNGSLAEGEIIIRSENITNNVKTIIVHLNESVKIECTRPNNKTRTSIRIGPGQWFYATGQVIGDIREAYCNINESKWNETLQRVSKKLKEYFPHKNITFQPSSGGDLEITTHSFNCGGEFFYCNTSSLFNRTYMANSTDMANSTETNSTRTITIHCRIKQIINMWQEVGRAMYAPPIAGNITCISNITGLLLTRDGGKNNTETFRPGGGNMKDNWRSELYKYKVVKIEPLGVAPTRCKRRVVGRRRRRRAVGIGAVFLGFLGAAGSTMGAASMTLTVQARNLLSGIVQQQSNLLRAPEAQQHLLKLTVWGIKQLQARVLAVERYLRDQQLLGIWGCSGKLICCTNVPWNSSWSNRNLSEIWDNMTWLQWDKEISNYTQIIYGLLEESQNQQEKNEQDLLALDGGGSGDIIKLLNEQVNKEMNSSNLYMSMSSWCYTHSLDGAGLFLFDHAAEEYEHAKKLIIFLNENNVPVQLTSISAPEHKFEGLTQIFQKAYEHEQHISESINNIVDHAIKSKDHATFNFLQWYVAEQHEEEVLFKDILDKIELIGNENHGLYLADQYVKGIAKSRKS

SEQ ID NO: 82 - DNA, 2451 bp, synthetic construct
  source 1..2451: mol_type = other DNA
atgcccatgggctccctgcagcccctggccaccctgtacctgctgggcatgctggtggcctccgtgctggccgccgagaacctgtgggtgaccgtgtactacggcgtgcccgtgtggaaggaggccaagaccaccctgttctgcgcctccgacgccaaggcctacgagaagaaggtgcacaacgtgtgggccacccacgcctgcgtgcccaccgaccccaacccccaggagatggtgctgaagaacgtgaccgagaacttcaacatgtggaagaacgacatggtggaccagatgcacgaggacgtgatctccctgtgggaccagtccctgaagccctgcgtgaagctgacccccctgtgcgtgaccctgaactgcaccaacgccaccgcctccaactcctccatcatcgagggcatgaagaactgctccttcaacatcaccaccgagctgcgcgacaagcgcgagaagaagaacgccctgttctacaagctggacatcgtgcagctggacggcaactcctcccagtaccgcctgatcaactgcaacacctccgtgatcacccaggcctgccccaaggtgtccttcgaccccatccccatccactactgcgcccccgccggctacgccatcctgaagtgcaacaacaagaccttcaccggcaccggcccctgcaacaacgtgtccaccgtgcagtgcacccacggcatcaagcccgtggtgtccacccagctgctgctgaacggctccctggccgagggcgagatcatcatccgctccgagaacatcaccaacaacgtgaagaccatcatcgtgcacctgaacgagtccgtgaagatcgagtgcacccgccccaacaacaagacccgcacctccatccgcatcggccccggccagtggttctacgccaccggccaggtgatcggcgacatccgcgaggcctactgcaacatcaacgagtccaagtggaacgagaccctgcagcgcgtgtccaagaagctgaaggagtacttcccccacaagaacatcaccttccagccctcctccggcggcgacctggagatcaccacccactccttcaactgcggcggcgagttcttctactgcaacacctcctccctgttcaaccgcacctacatggccaactccaccgacatggccaactccaccgagaccaactccacccgcaccatcaccatccactgccgcatcaagcagatcatcaacatgtggcaggaggtgggccgcgccatgtacgccccccccatcgccggcaacatcacctgcatctccaacatcaccggcctgctgctgacccgcgacggcggcaagaacaacaccgagaccttccgccccggcggcggcaacatgaaggacaactggcgctccgagctgtacaagtacaaggtggtgaagatcgagcccctgggcgtggcccccacccgctgcaagcgccgcgtggtgggccgccgccgccgccgccgcgccgtgggcatcggcgccgtgttcctgggcttcctgggcgccgccggctccaccatgggcgccgcctccatgaccctgaccgtgcaggcccgcaacctgctgtccggcatcgtgcagcagcagtccaacctgctgcgcgcccccgaggcccagcagcacctgctgaagctgaccgtgtggggcatcaagcagctgcaggcccgcgtgctggccgtggagcgctacctgcgcgaccagcagctgctgggcatctggggctgctccggcaagctgatctgctgcaccaacgtgccctggaactcctcctggtccaaccgcaacctgtccgagatctgggacaacatgacctggctgcagtgggacaaggagatctccaactacacccagatcatctacggcctgctggaggagtcccagaaccagcaggagaagaacgagcaggacctgctggccctggacggcggcggctccggcgacatcatcaagctgctgaacgagcaggtgaacaaggagatgaactcctccaacctgtacatgtccatgtcctcctggtgctacacccactccctggacggcgccggcctgttcctgttcgaccacgccgccgaggagtacgagcacgccaagaagctgatcatcttcctgaacgagaacaacgtgcccgtgcagctgacctccatctccgcccccgagcacaagttcgagggcctgacccagatcttccagaaggcctacgagcacgagcagcacatctccgagtccatcaacaacatcgtggaccacgccatcaagtccaaggaccacgccaccttcaacttcctgcagtggtacgtggccgagcagcacgaggaggaggtgctgttcaaggacatcctggacaagatcgagctgatcggcaacgagaaccacggcctgtacctggccgaccagtacgtgaagggcatcgccaagtcccgcaagtcctgataa

SEQ ID NO: 83 - protein, 815 aa, synthetic construct
MPMGSLQPLATLYLLGMLVASVLAAENLWVTVYYGVPVWKEAKTTLFCASDAKAYEKKVHNVWATHACVPTDPNPQEMVLKNVTENFNMWKNDMVDQMHEDVISLWDQSLKPCVKLTPLCVTLNCTNATASNSSIIEGMKNCSFNITTELRDKREKKNALFYKLDIVQLDGNSSQYRLINCNTSVITQACPKVSFDPIPIHYCAPAGYAILKCNNKTFTGTGPCNNVSTVQCTHGIKPVVSTQLLLNGSLAEGEIIIRSENITKNVKTIIVHLNESVKIECTRPNNKTRTSIRIGPGQWFYATGQVIGDIREAYCNINESKWNETLQRVSKKLKEYFPHKNITFQPSSGGDLEITTHSFNCGGEFFYCNTSSLFNRTYMANSTDMANSTETNSTRTITIHCRIKQIINMWQEVGRAMYAPPIAGNITCISNITGLLLTRDGGKNNTETFRPGGGNMKDNWRSELYKYKVVKIEPLGVAPTRCKRRVVGRRRRRRAVGIGAVFLGFLGAAGSTMGAASMTLTVQARNLLSGIVQQQSNLLRAPEAQQHLLKLTVWGIKQLQARVLAVERYLRDQQLLGIWGCSGKLICCTNVPWNSSWSNRNLSEIWDNMTWLQWDKEISNYTQIIYGLLEESQNQQEKNEQDLLALDGGGSGDIIKLLNEQVNKEMNSSNLYMSMSSWCYTHSLDGAGLFLFDHAAEEYEHAKKLIIFLNENNVPVQLTSISAPEHKFEGLTQIFQKAYEHEQHISESINNIVDHAIKSKDHATFNFLQWYVAEQHEEEVLFKDILDKIELIGNENHGLYLADQYVKGIAKSRKS

SEQ ID NO: 84 - DNA, 2451 bp, synthetic construct
  source 1..2451: mol_type = other DNA
atgcccatgggctccctgcagcccctggccaccctgtacctgctgggcatgctggtggcctccgtgctggccgccgagaacctgtgggtgaccgtgtactacggcgtgcccgtgtggaaggaggccaagaccaccctgttctgcgcctccgacgccaaggcctacgagaagaaggtgcacaacgtgtgggccacccacgcctgcgtgcccaccgaccccaacccccaggagatggtgctgaagaacgtgaccgagaacttcaacatgtggaagaacgacatggtggaccagatgcacgaggacgtgatctccctgtgggaccagtccctgaagccctgcgtgaagctgacccccctgtgcgtgaccctgaactgcaccaacgccaccgcctccaactcctccatcatcgagggcatgaagaactgctccttcaacatcaccaccgagctgcgcgacaagcgcgagaagaagaacgccctgttctacaagctggacatcgtgcagctggacggcaactcctcccagtaccgcctgatcaactgcaacacctccgtgatcacccaggcctgccccaaggtgtccttcgaccccatccccatccactactgcgcccccgccggctacgccatcctgaagtgcaacaacaagaccttcaccggcaccggcccctgcaacaacgtgtccaccgtgcagtgcacccacggcatcaagcccgtggtgtccacccagctgctgctgaacggctccctggccgagggcgagatcatcatccgctccgagaacatcaccaagaacgtgaagaccatcatcgtgcacctgaacgagtccgtgaagatcgagtgcacccgccccaacaacaagacccgcacctccatccgcatcggccccggccagtggttctacgccaccggccaggtgatcggcgacatccgcgaggcctactgcaacatcaacgagtccaagtggaacgagaccctgcagcgcgtgtccaagaagctgaaggagtacttcccccacaagaacatcaccttccagccctcctccggcggcgacctggagatcaccacccactccttcaactgcggcggcgagttcttctactgcaacacctcctccctgttcaaccgcacctacatggccaactccaccgacatggccaactccaccgagaccaactccacccgcaccatcaccatccactgccgcatcaagcagatcatcaacatgtggcaggaggtgggccgcgccatgtacgccccccccatcgccggcaacatcacctgcatctccaacatcaccggcctgctgctgacccgcgacggcggcaagaacaacaccgagaccttccgccccggcggcggcaacatgaaggacaactggcgctccgagctgtacaagtacaaggtggtgaagatcgagcccctgggcgtggcccccacccgctgcaagcgccgcgtggtgggccgccgccgccgccgccgcgccgtgggcatcggcgccgtgttcctgggcttcctgggcgccgccggctccaccatgggcgccgcctccatgaccctgaccgtgcaggcccgcaacctgctgtccggcatcgtgcagcagcagtccaacctgctgcgcgcccccgaggcccagcagcacctgctgaagctgaccgtgtggggcatcaagcagctgcaggcccgcgtgctggccgtggagcgctacctgcgcgaccagcagctgctgggcatctggggctgctccggcaagctgatctgctgcaccaacgtgccctggaactcctcctggtccaaccgcaacctgtccgagatctgggacaacatgacctggctgcagtgggacaaggagatctccaactacacccagatcatctacggcctgctggaggagtcccagaaccagcaggagaagaacgagcaggacctgctggccctggacggcggcggctccggcgacatcatcaagctgctgaacgagcaggtgaacaaggagatgaactcctccaacctgtacatgtccatgtcctcctggtgctacacccactccctggacggcgccggcctgttcctgttcgaccacgccgccgaggagtacgagcacgccaagaagctgatcatcttcctgaacgagaacaacgtgcccgtgcagctgacctccatctccgcccccgagcacaagttcgagggcctgacccagatcttccagaaggcctacgagcacgagcagcacatctccgagtccatcaacaacatcgtggaccacgccatcaagtccaaggaccacgccaccttcaacttcctgcagtggtacgtggccgagcagcacgaggaggaggtgctgttcaaggacatcctggacaagatcgagctgatcggcaacgagaaccacggcctgtacctggccgaccagtacgtgaagggcatcgccaagtcccgcaagtcctagtaa

SEQ ID NO: 85 - protein, 9 aa, synthetic construct
DRDRDELRQ

SEQ ID NO: 86 - protein, 9 aa, synthetic construct
OROROELRQ

SEQ ID NO: 87 - protein, 9 aa, synthetic construct
HRHRHELRQ

SEQ ID NO: 88 - protein, 8 aa, synthetic construct
VOODMESH

SEQ ID NO: 89 - protein, 8 aa, synthetic construct
VOODMGSH

SEQ ID NO: 90 - protein, 6 aa, synthetic construct
VOODMS

SEQ ID NO: 91 - protein, 12 aa, synthetic construct
TNATASNSSIIE

SEQ ID NO: 92 - protein, 11 aa, synthetic construct
STYNNTHNISK

SEQ ID NO: 93 - protein, 16 aa, synthetic construct
QAFNSSSHTNSSIAMQ

SEQ ID NO: 94 - protein, 6 aa, synthetic construct
DGNSSQ

SEQ ID NO: 95 - protein, 18 aa, synthetic construct
OTELRDKYDYSIYMKNKI

SEQ ID NO: 96 - protein, 36 aa, synthetic construct; identical to SEQ ID NO: 25

SEQ ID NO: 97 - protein, 25 aa, synthetic construct
KOTELRDKNYDYTSIYEMKSNKOIL

SEQ ID NO: 98 - protein, 28 aa, synthetic construct
MHOELRDKQKVNALVEISRIQSQMISLF

SEQ ID NO: 99 - protein, 13 aa, synthetic construct
NATTELRNKRQKV

SEQ ID NO: 100 - protein, 13 aa, synthetic construct
NATTELSNKRQKV

SEQ ID NO: 101 - protein, 13 aa, synthetic construct
NATTELRNKIQKV

SEQ ID NO: 102 - protein, 13 aa, synthetic construct
NATTELRDKIQKV

SEQ ID NO: 103 - protein, 13 aa, synthetic construct
NATTELKDKIQKV

SEQ ID NO: 104 - protein, 13 aa, synthetic construct
NATTELKDKTQKV

SEQ ID NO: 105 - protein, 13 aa, synthetic construct
NATTELKDKEQKV

SEQ ID NO: 106 - protein, 13 aa, synthetic construct
NATTELKDKEQKV

SEQ ID NO: 107 - protein, 13 aa, synthetic construct
NATTELKDKEQKV

SEQ ID NO: 108 - protein, 31 aa, synthetic construct
NATTELRNKRQKVHSLFYRLDIVELNEGNSS

SEQ ID NO: 109 - protein, 31 aa, synthetic construct
NATTELRDKIQKVHSLFYRLDLVELNEGNSS

SEQ ID NO: 110 - protein, 31 aa, synthetic construct
NATTELSNKKQKVHSLFYRLDIVELNEGNSS

SEQ ID NO: 111 - protein, 31 aa, synthetic construct
NATTELRDKVQKVHSLFYRLDLVELNEGNSS

SEQ ID NO: 112 - protein, 31 aa, synthetic construct
NATTELKDKIQKVHSLFYRLDMVQLNEGNSS

SEQ ID NO: 113 - protein, 19 aa, synthetic construct
NATTELRNKRQKVHSLFYR

SEQ ID NO: 114 - protein, 19 aa, synthetic construct
NMTTELRDKRRKVNALFYK

SEQ ID NO: 115 - protein, 19 aa, synthetic construct
NMTTELRNKRRKVNALFYK

SEQ ID NO: 116 - protein, 33 aa, synthetic construct
VKOTELRDRRKVYSLAVOTGKQIMHTQSVTVLG

SEQ ID NO: 117 - protein, 8 aa, synthetic construct
KKRKELRM

SEQ ID NO: 118 - protein, 31 aa, synthetic construct
SNVTRQNSTSNSNNNPTLKNNTSGKNETGVL

SEQ ID NO: 119 - protein, 23 aa, synthetic construct
SNVTRQNSTSNNNTSGKNETGVL

SEQ ID NO: 120 - protein, 31 aa, synthetic construct
SNVTRQNSTSNGNNNPTLKNNTSGKNETGVL

SEQ ID NO: 121 - protein, 14 aa, synthetic construct
STLNTSGKNETGVL

SEQ ID NO: 122 - protein, 16 aa, synthetic construct
STLKNNTSGKNKTGVL

SEQ ID NO: 123 - protein, 24 aa, synthetic construct
SNVARQRSTSNSNNTSGMNETGVL

SEQ ID NO: 124 - protein, 24 aa, synthetic construct
SNVTRQNSTSNENNTSGKNETGVL

SEQ ID NO: 125 - protein, 24 aa, synthetic construct
SNVAGQNSTSNSNNTSGKNETGVL

SEQ ID NO: 126 - protein, 16 aa, synthetic construct
STLNNNTAGKNETGGL

SEQ ID NO: 127 - protein, 12 aa, synthetic construct
STLKGKNKTGVL

SEQ ID NO: 128 - protein, 7 aa, synthetic construct
GSGTGDT

SEQ ID NO: 129 - protein, 8 aa, synthetic construct
TNSSNTTN

SEQ ID NO: 130 - protein, 6 aa, synthetic construct
NKNGRQ

SEQ ID NO: 131 - protein, 7 aa, synthetic construct
GNGTGDT

SEQ ID NO: 132 - protein, 4 aa, synthetic construct
GNGT

SEQ ID NO: 133 - protein, 7 aa, synthetic construct
GRGTGDT

SEQ ID NO: 134 - protein, 7 aa, synthetic construct
GNKTGDT

SEQ ID NO: 135 - protein, 7 aa, synthetic construct
GNGTGNT

SEQ ID NO: 136 - protein, 6 aa, synthetic construct
GRGKGT

SEQ ID NO: 137 - protein, 16 aa, synthetic construct
SDAKVNINATYNGTRE

SEQ ID NO: 138 - protein, 9 aa, synthetic construct
NKEGNNNSE

SEQ ID NO: 139 - protein, 33 aa, synthetic construct
MHOMELRDKQKVNALAVEIKSRIQDSQMINLFR

SEQ ID NO: 140 - protein, 23 aa, synthetic construct
OELRDKKALVEIKSRIQDQMILF

SEQ ID NO: 141 - protein, 153 aa, synthetic construct
PLCVTLNCSDAKVNINATYNGTREEIKNCSFNATTELRDKKKKEYALFYRLDIVPLNKEGNNNSEYRLINCNTSVITQACPKDPNPQELVLKNVTHCNISEIKWEKTLQRLFFNKTFDETYSTGSNSTNSTITLPCRIKMQWDREIDNYTDTI

SEQ ID NO: 142 - protein, 145 aa, synthetic construct
PLCVTLHCSTYNNTHNISKEIKNCSFNMTTELRDKKQKVNALFYRLDIVPLNKNGRQYRLINCNTSAITQACPKDPNPQEMVLKNVTHCNISESKWEKTLQRLFFNKTFDETYSTGSNSTNSTITLPCRIKMQWDREINNYTDTI

SEQ ID NO: 143 - protein, 145 aa, synthetic construct
PLCVTLHCSTYNNTHNISKEIKNCSFNATTELRDKKKKVNALFYRLDIVPLNKNGRQYRLINCNTSAITQACPKDPNPQEMVLKNVTHCNISESKWEKTLQRLFFNKTFDETYSTGSNSTNSTITLPCRIKMQWDREINNYTDTI

SEQ ID NO: 144 - protein, 145 aa, synthetic construct
PLCVTLHCSTYNNTHNISKEIKNCSFNATTELRDKRKKVNALFYRLDIVPLNKNGRQYRLINCNTSAITQACPKDPNPQEMVLKNVTHCNISESKWNKTLQRLFFNKTFNETYSTGSNSTNSNITLPCRIKMQWDREINNYTDTI

SEQ ID NO: 145 - protein, 145 aa, synthetic construct
PLCVTLHCSTYNNTHNISKEIKNCSFNATTELRDKRRKVNALFYRLDIVPLNKNGRQYRLINCNTSAITQACPKDPNPQEMVLKNVTHCNISESKWNKTLQRLFFNKTFNETYSTGSNSTNSNITLPCRIKMQWDREINNYTDTI

SEQ ID NO: 146 - protein, 854 aa, synthetic construct
MRVKEKYQHLWRWGWRWGTMLLGMLMICSATEKLWVTVYYGVPVWKEATTTLFCASDAKAYDTEVHNVWATHACVPTDPNPQEVVLVNVTENFNMWKNDMVEQMHEDIISLWDQSLKPCVKLTPLCVSLKCTDLKNDTNTNSSSGRMIMEKGEIKNCSFNISTSIRGKVQKEYAFFYKLDIIPIDNDTTSYKLTSCNTSVITQACPKVSFEPIPHYCAPAGFAILKCNNKTFNGTGPCTNVSTVQCTHGIRPVVSTQLLLNGSLAEEEVVIRSVNFTDNAKTIIVQLNTSVEINCTRPNNNTRKRIRIQRGPGRAFVTIGKIGNMRQAHCNISRAKWNNTLKQIASKLREQFGNNKTIIFKQSSGGDPEIVTHSFNCGGEFFYCNSTQLFNSTWFNSTWSTEGSNNTEGSDTITLPCRIKQIINMWQKVGKAMYAPPISGQIRCSSNITGLLLTRDGGNSNNESEIFRPGGGDMRDNWRSELYKYKVVKIEPLGVAPTKAKRRVVQREKRAVGIGALFLGFLGAAGSTMGAASMTLTVQARQLLSGIVQQQNNLLRAIEAQQHLLQLTVWGIKQLQARILAVERYLKDQQLLGIWGCSGKLICTTAVPWNASWSNKSLEQIWNHTTWMEWDREINNYTSLIHSLIEESQNQQENEQELLELDKWASLWNWFNITNWLWYIKLFIMIVGGLVGLRIVFAVLSIVNRVRQGYSPLSFQTHLPTPRGPDRPEGIEEEGGERDRDRSIRLVNGSLALIWDDLRSLCLFSYHRLRDLLLIVTRIVELLGRRGWEALKYWWNLLQYWSQELKNSAVSLLNATAIAVAEGTDRVIEVVQGACRAIRHIPRRIRQGLERILL

SEQ ID NO: 147 - protein, 766 aa, synthetic construct
MRVMGIQRNYPQWWIWSMLGFWMLMICNGMWVTVYYGVPWKEAKTTLFCASDAKAYEKEVHNVWATHACVPTDPNPQEMVLKNVTENFNMWKNDMVDQMHEDVISLWDQSLKPCVKLTPLCVTLHCSTYNNTHNISKGMKNCSFNATTELRDKKQKVNALFYKLDIVQLNKNGRQYRLINCNTSVITQACPKVSFDPIPIHYCAPAGYAILKCNNKTFNGTGPCNNVSTVQCTHGIKPVVSTQLLLNGSLAEGEIIIRSENITNNVKTIIVHLNESVKIECTRPNNKTRTSIRIGPGQTFYATGQVIGDIREAYCNINKSWNETLQRVSKKLKEYFPHKNITFQPSSGGDLEITTHSFNCGGEFFYCNTSSLFNRTYMANSTETNSTRTITIHCRIKQIINMWQEVGRAMYAPPIAGNITCISNITGLLLTRDGGKNNTETFRPGGGNMKDNWRSELYKYKVVEVKPLGVAPTNARRRVVEREKRAVGMGAVFLGAAGSTMGAASITLTVQARQLLSGIVQQQSNLLKAIEAQQHMLKLTVWGIKQLQARVLALERYLKDQQLLGMQGCSGKLICTTNVYWNSSWSNKTYGDIWDNMTWMQFAVLSLVNRVRQGYSPLSFQTLIPSPRGPDRPGGIEEEGGEQDRNRSTRLVSGFLALVWDDLRSLCLFIYHRLRDFILIAARAGELLGRSSLKGLRRGWEALKYLGSLVQYWGLELKRSAISLLDTLAIAVGEGTDRILEFVLGICRAIRNIPTRIRQGFETALL

SEQ ID NO: 148 - protein, 853 aa, synthetic construct
MRVMGIQRNYPQWWIWSMLGFWMLMICNGMWVTVYYGVPVWKEAKTTLFCASDAKAYEKEVHNVWATHACVPTDPNPQEMVLKNVTENFLNIIIFNMWKNDMVDQMHEDVISLWDQSLKPCVKLTPLCVTLHCSTYNNTHNISKGMNKNCSFNATTELRDKKQKVNALFYKLDIVQLNKNGRQYRLINCNTSVITQACPKVSFDPIPIHYCAPAGYAILKCLNNKTFNGTGPCNNVSTVQCTHGIKPVVSTQLLLNGSLAEGEIIIRSENITNNVKTIIVHLNESVKIECTRPNNKTRTSIRIGPGQTFYATGQVIGDIREAYCNISKSKWNETLQRVSKKLKEYFPHKNITFQPSSGGDLEITTHSFNCGGEFFYCNTSSLFNRTYMANSTDMANSTETNSTRTITIHCRIKQIINMWQEVGRAMYAPPIAGNITCISNITGLLLLTRDGGKNNTETFRPGGGNMKDNWRSELYKYKVVEVKPLGVAPTNARRRVVEREKRAEGMGAVFLGFLGAAGSTMGAASITLTVQARQLLSGIVQQQSNLLKAIEAQQHMLKLTVWGIKQLQARVLALERYLKDQQLLGMWGCSGKLICTTNVYWNSSWSNKTYGDIWDNMTWMQWDREISNYTEIIYRLLEESQNQQEKNEQDLLALDRWNSLWNWFNITNWLWYIKIFIMIVGGLIGLRIIFAVLSLNRVRQGVSPLSFQTLIPSPRGPDRPGGIEEEGGEQDRNRSTRLVSGFLALVWDDLRSLCLFIYHRLRDFILIAARAGELLGRSSLKGLRRGWEALKYLGSLVQYWGLELKRSAISLLDTLAIAVGEGTDRILEFVLGICRAIRNIPTRIRQGFETALL

SEQ ID NO: 149 - protein, 845 aa, synthetic construct
MRVMGIQRNYPQWWIWSMLGFWMLMICNGMWVTVYYGVPVWKEAKTTLFCASDAKAYEKEVHNVWATHACVPTDPNPQEMVLKNVTENFNMWKNDMVDQMHEDVISLWDQSLKPCVKLTPLCVTLHCSTYNNTHNISKGMKNCSFNATTELRDKKQKVNALFYKLDIVQLNKNGRQYRLLINCNTSVITQACPKVSFDPIPIHYCAPAGYAILKCNNKTFNGTGPCNNVSTVQCTHGIKPVVSTQLLLNGSLAEGEIIIRSENITNNVKTIIVHLNESVKIECTRPNNKTRTSIRIGPGQTFYATGQVIGDIREAYCNISKSKWNETLQRVSKKLKEYFPHKNITFQPSSGGDLEITTHSFNCGGEFFYCNTSSLFNRTYMANSTDMANSTETNSTRTITIHCRIKQIINMWQEVGRAMYAPPIAGNITCISNITGLLLTRDGGKNNTETFRPGGGNMKDNWRSELYKYKVVEVKPLGVAPTNARRRVVEREKRAVGMGAVFLGFLGAAGSTMGAASITLTVQARQLLSGIVQQQSNLLKAIEAQQHMLKLTVWGIKQLQARVLALERYLKQQLLGMWGCSGKLICTTNVYWNSSWSNKTYGDIWDNMTWMQWDREISNYTEIIYRLLEESQNQQEKNEQDLLALDRWNSLWNWFNITNWLWYIKIFIMIVGGLIGLRIIFAVLSLVNRVRQGYSPLSFQTLIPSPRGPDRPGGIEEEGGEQDRNRSTRLVSGFLALVWDDLRSLCLFIYHRLRDFILIAARAGELLGRSSLKGLRRGWEALKYLGSLVQYWGLELKRSAISLLDTLAIAVGEGTDRILEFVLGICRAIRNIPTRIRQGFETALL

SEQ ID NO: 150 - protein, 833 aa, synthetic construct
MRVMGIQRNYPQWWIWSMLGFWMLMICNGMWVTVYYGVPVWKEAKTTLFCASDAKAYEKEVHNVWATHACVPTDPNPQEMVKNVTENFNMWKNDMVDQMHEDVISLWDQSLKPCVKLTPLCVTLHCSTYNNTHNISKGMKNCSFNMTTELRDKKQKVNALFYKLDIVQLNKNGRQYRLINCNTSAITQACPKVSFDPIPIHYCAPAGYAILKCNNKTFNGTGPCNNVSTVQCTHGIKPVVSTQLLLNGSLAEGEIIIRSENITNNVKTIIVHLNESVKIECTRPNNKTRKSIRIGPGQTFYATGDVIGDIREAYCNINKSKWNETLQRVSKKLKEYFPHKNITFQPSSGGDLEITTHSFNCGGEFFYCNTSSLFNRTYMANSTDMANSTETNSTRTITIHCRIKQIINMWQEVGRAMYAPPIAGNITCISNITGLLLTRDGGKNNTETFRPGGGNMKDNWRSELYKYKVVEVKPLGVAPTNARRRVVEREKRAVGMGAVFTGFLGAASITLTVQARQLLSGIVQQQSNLLKAIEAQQHMLKLTVWGIKQLQARVLALERYLKDQQLLGMWGCSGKLICTTNVYENSSWSNKTYGDIWDNMTWMQWDREISNYTEIIYRLLEESQNQQEKNEQDLLALDRWNSLWNWFNITNWLWYIKIFIVGGLIGLRIIFAVLSLVNRRQGYSPLSFQTLIPSPRGPDRPGRIEEEGGEQDRNRSTRLVSGFLALVWDDLRSLCLFIYHRLRDFILIAARAGELLGRSSLKGLRRGWEALKYLGSLVQYWGLELKRSAILLDTLAIAVGEGTDRILEFVLGICRAIRNIPTRIRQGFETALL

SEQ ID NO: 151 - protein, 845 aa, synthetic construct; identical to SEQ ID NO: 44

SEQ ID NO: 152 - protein, 845 aa, synthetic construct; identical to SEQ ID NO: 45

SEQ ID NO: 153 - protein, 845 aa, synthetic construct; identical to SEQ ID NO: 67

SEQ ID NO: 154 - protein, 845 aa, synthetic construct
MRVMGIQRNYPQWWIWSMLGFWMLMICNGMWVTVYYGVPVWKEAKTTLFCASDAKAYEKEVHNVWATHACVPTDPNPQEMVLKNVTENFNMWKNDMVDQMHEDVISLWDQSLKPCVKLTPLCVTLDCSTYNNTHNISKGMKNCSFNMTTELRNKRRKVNALFYKLDIVQLNKNGRQYRLINCNTSAITQACPKVSFDPIPIHYCAPAGYAILKCNNKTFNGTGPCNNVSTVQCTHGIKPVVSTQLLLNGSLAEGEIIIRSENITNNVKTIIVHLNESVKIECTRPNNKTRKSIRIGPGQTFYATGDVIGDIREAYCNISKSKWNETLQRVSKKLKEYFPHKNITFQPSSGGDLEITTHSFNCGGEFFYCNTSSLFNRTYMANSTDMANSTETNSTRTITIHCRIKQIINMWQEVGRAMYAPPIAGNITCISNITGLLLTRDGGKNNTETFRPGGGNMKDNWRSELYKYKVVEVKPLGVAPTNARRRVVEREKRAVGMGAVFLGFLGAAGSTMGAASITLTVQARQLLSGIVQQQSNLLKAIEAQQHMLKLTVWGIKQLQARVLALERYLKDQQLLGMWGCSGKLICTTNVYWNSSWSNKTYGDIWDNMTWMQWDREISNYTEIIYRLLEESQNQQEKNEQDLLALDRWNSLWNWFNITNWLWYIKIFIMIVGGLIGLRIIFAVLSLVNRVRQGYSPLSFQTLIPSPRGPDRPGRIEEGGGEQDRNRSTRLVSGFLALVWDDLRSLCLFIYHRLRDFILIAARAGELLGRSSLKGLRRGWEALKYLGSLVQYWGLELKRSAISLLDTLAIAVGEGTDRILEFVLGICRAIRHIPTRIRQGFETALL

SEQ ID NO: 155 - protein, 862 aa, synthetic construct
MTVTGTWRNYQQWWIWGILGFWMLMICNGLWVTVYYGVPVWREAKTTLFCASDAKSYEKEVHNVWATHACVPTDPNPQELVLKNVTENFNMWKNDMVDQMHEDIISLWDQSLKPCVKLTPLCVTLHCSTYNNTHNISKEIKNCSFNATTELRDKKKKEYALFYRLDIVPLNKNGRQYRLINCNTSVITQACPKVTFDPIPIHYCAPAGYAILKCNNKTFNGTGPCNNVSTVQCTHGIKPVVSTQLLLNGSLAEEEIIIRSENLTDNVKTIIVHLNESVEINCTRPNNNTRKSIRIGPGQTFYATGDIIGDIRQAHCNISEIKWEKTLQRVSEKLREHFNKTIIFNQSSGGDLEITTHYFNCGGEFFYCNTSDLFFNKTFDETYSTGSNSTNSTITLPCRIKQIINMWQEVGRAMYASPIAGEITCKSNITGLLLTRDGGGNNSTEETFRPGGGNMRDNWRSELYKYKVVEVKPLGIAPTEARRRVVQKEKRAVVGLGAVFLGFLGTAGSTMGAASITLTVQARQLLSGIVQQQSNLLRAIEAQQHMLQLTVWGIKQLQARVLAIERYLKDQQLLGMWGCSGKLICTTNVYWNSSWSNKTYNEIWDNMTWMQWDREIDNYTDTIYKLLEVSQKQQESNEKDLLALDSWNNLWNWFDISKWLWYIKIFIMIVGGLIGLRIIFAVLSLVNRVRQGYSPLSFQTLLPTPRGPARPEGIEEEGGEQGRDRSIRLLTGLSELIWDDLRNLCLFSYHHLRDLILIAARIVQLLGRRGWEALKYLWNILQYWIQELKNSAISLFDTIAIAVAYLQYGWSYFHEAVQAGWRSATETLAGAWGDLWETLRRGGRWILAIPRRIRQGLELTLL

SEQ ID NO: 156 - protein, 862 aa, synthetic construct
MTVTGTWRNYQQWWIWGILGFWMLMICNGLWVTVYYGVPVWREAKTTLFCASDAKSYEKEVHNVWATHACVPTDPNPQELVLKNVTENFNMWKNDMVDQMHEDIISLWDQSLKPCVKLTPLCVTLHCSTYNNTHNISKEIKNCSFNATTELRDKRKKEYALFYRLDIVPLNKNGRQYRLINCNTSVITQACPKVTFDPIPIHYCAPAGYAILKCNNKTFNGTGPCNNVSTVQCTHGIKPVVSTQLLLNGSLAEEEIIIRSENLTDNVKTIIVHLNESVEINCTRPNNNTRKSIRIGPGQTFYATGDIIGDIRQAHCNISEIKWNKTLQRVSEKLREHFNKTIIFNQSSGGDLEITTHYFNCGGEFFYCNTSDLFFNKTFNETYSTGSNSTNSNITLPCRIKQIINMWQEVGRAMYASPIAGEITCKSNITGLLLTRDGGGNNSTEETFRPGGGNMRDNWRSELYKYKVVEVKPLGIAPTEARRRVVQKEKRAVVGLGAVFLGFLGTAGSTMGAASITLTVQARQLLSGIVQQQSNLLRAIEAQQHMLQLTVWGIKQLQARVLAIERYLKDQQLLGMWGCSGKLICTTNVYWNSSWSNKTYNEIWDNMTWMQWDREIDNYTDTIYKLLEVSQKQQESNEKDLLALDSWNNLWNWFDISKWLWYIKIFIMIVGGLIGLRIIFAVLSLVNRVRQGYSPLSFQTLLPTPRGPARPEGIEEEGGEQGRDRSIRLLTGLSELIWDDLRNLCLFSYHHLRDLILIAARIVQLLGRRGWEALKYLWNILQYWIQELKNSAISLFDTIAIAVAYLQYGWSYFHEAVQAGWRSATETLAGAWGDLWETLRRGGRWILAIPRRIRQGLELTLL

SEQ ID NO: 157 - protein, 862 aa, synthetic construct
MTVTGTWRNYQQWWIWGILGFWMLMICNGLWVTVYYGVPVWREAKTTLFCASDAKSYEKEVHNVWATHACVPTDPNPQELVLKNVTENFNMWKNDMVDQMHEDIISLWDQSLKPCVKLTPLCVTLHCSTYNNTHNISKEIKNCSFNATTELRDKRRKEYALFYRLDIVPLNKNGRQYRLINCNTSVITQACPKVTFDPIPIHYCAPAGYAILKCNNKTFNGTGPCNNVSTVQCTHGIKPVVSTQLLLNGSLAEEEIIIRSENLTDNVKTIIVHLNESVEINCTRPNNNTRKSIRIGPGQTFYATGDIIGDIRQAHCNISEIKWNKTLQRVSEKLREHFNKTIIFNQSSGGDLEITTHYFNCGGEFFYCNTSDLFFNKTFNETYSTGSNSTNSNITLPCRIKQIINMWQEVGRAMYASPIAGEITCKSNITGLLLTRDGGGNNSTEETFRPGGGNMRDNWRSELYKYKVVEVKPLGIAPTEARRRVVQKEKRAVVGLGAVFLGFLGTAGSTMGAASITLTVQARQLLSGIVQQQSNLLRAIEAQQHMLQLTVWGIKQLQARVLAIERYLKDQQLLGMWGCSGKLICTTNVYWNSSWSNKTYNEIWDNMTWMQWDREIDNYTDTIYKLLEVSQKQQESNEKDLLALDSWNNLWNWFDISKWLWYIKIFIMIVGGLIGLRIIFAVLSLVNRVRQGYSPLSFQTLLPTPRGPARPEGIEEEGGEQGRDRSIRLLTGLSELIWDDLRNLCLFSYHHLRDLILIAARIVQLLGRRGWEALKYLWNILQYWIQELKNSAISLFDTIAIAVAYLQYGWSYFHEAVQAGWRSATETLAGAWGDLWETLRRGGRWILAIPRRIRQGLELTLL

SEQ ID NO: 158 - protein, 864 aa, synthetic construct
MKVMEERKRSFNGFYMTMTICMALLIPCLTSDEWVTVYYGVPVWREVNTVLFCASDAKAHSTEAHNIWATHACVPTDPNPQEVVLHNVTEDFNMWNNQMVEQMQEDISSLWDQSLKPCVKLTPLCVTMKCSNVTRQNSTSNSNNNPTLKNNTSGKNETGVLQMKNCTFNTTTELRDKRRKVYSLFYVDDLQSLGSGTGDTYTMINCNTTAITQACPKVSFEPIPIHYCAPAGFAILKCNDVNFSGKGKCRNVSTVHCTHGIKPVVTTQLIINGSLATENITVRVNNASKNTHDWIVQLSTAVNLTCKRVGNNTRGKVQIGPGMTFYNMDHIFGDTRKAFCELNGTTWNETLQKVRESLIKEIKANANGTYNITFEPSSGGDPEIANHMFNCGGEFFYCDTRKMFNESEPFHENMTIPCRIRQIVNSWMRVGRGIYAPPIPGHITCNSLITGLILTRDHVNNTNNTFRPIGGDMKNIWRSELYKYKVVRIEPLSVAPTKAKRHTVGERRQKRAAFGLGALFLGFLGAAGSTMGAAAVTLTVQARQLLSGIVQQQNNLLRAIEAQQHLLQLTVWGVKQLQARLLAVERYLQDQQILGLWGCSGKSICYTTVPWNKTWSGKSMSDIWNNLTWQQWDKLITNYTGTIFGLLEEAQSQQEKNEKDLLELDQWASLWNWFDITNWLWYIKIFLMAVGGIIGLRIIMSVVSVIRRVRQGYSPLSLQTLIPAQREPGTLGETGGEGGEPGSGRSVRLVTGCWPLIWDDLRNLVIWSYRSLTSLACIVWRQLEKLGQLLINILRLIQEKLTLLRGIIQYWGRELRTSATSLLDATAIAVGEGTDRIIRAVQIVFRIIGNIPRRIRQGLERTLL

SEQ ID NO: 159 - protein, 864 aa, synthetic construct
MKVMEERKRSFNGFYMTMTICMALLIPCLTSDEWVTVYYGVPVWREVNTVLFCASDAKAHSTEAHNIWATHACVPTDPNPQEVVLHNVTEDFNMWNNQMVEQMQEDISSLWDQSLKPCVKLTPLCVTMHCSNVTRQNSTSNSNNNPTLKNNTSGKNETGVLQMKNCTFNTTTELRDKRRKVYSLFYVDDLQSLGSGTGDTYTMINCNTTAITQACPKVSFEPIPIHYCAPAGFAILKCNDVNFSGKGKCRNVSTVHCTHGIKPVVTTQLIINGSLATENITVRVNNASKNTHDWIVQLSTAVNLTCKRVGNNTRGKVQIGPGMTFYNMDHIFGDTRKAFCELNGTTWNETLQKVRESLIKEIKANANGTYNITFEPSSGGDPEIANHMFNCGGEFFYCDTRKMFNESEPFHENMTIPCRIRQIVNSWMRVGRGIYAPPIPGHITCNSLITGLILTRDHVNNTNNTFRPIGGDMKNIWRSELYKYKVVRIEPLSVAPTKAKRHTVGERRQKRAAFGLGALFLGFLGAAGSTMGAAAVTLTVQARQLLSGIVQQQNNLLRAIEAQQHLLQLTVWGVKQLQARLLAVERYLQDQQILGLWGCSGKSICYTTVPWNKTWSGKSMSDIWNNLTWQQWDKLITNYTGTIFGLLEEAQSQQEKNEKDLLELDQWASLWNWFDITNWLWYIKIFLMAVGGIIGLRIIMSVVSVIRRVRQGYSPLSLQTLIPAQREPGTLGETGGEGGEPGSGRSVRLVTGCWPLIWDDLRNLVIWSYRSLTSLACIVWRQLEKLGQLLINILRLIQEKLTLLRGIIQYWGRELRTSATSLLDATAIAVGEGTDRIIRAVQIVFRIIGNIPRRIRQGLERTLL

SEQ ID NO: 160 - protein, 856 aa, synthetic construct
MKVMEERKRSFNGFYMTMTICMALLIPCLTSDEWVTVYYGVPVWREVNTVLFCASDAKAHSTEAHNIWATHACVPTDPNPQEVVLHNVTEDFNMWNNQMVEQMQEDISSLWDQSLKPCVKLTPLCVTMKCSNVTRQNSTSNNNTSGKNETGVLQMKNCTFNTTTELRDKRRKVYSLFYVDDLQSLGSGTGDTYTMINCNTTAITQACPKVSFEPIPIHYCAPAGFAILKCNDVNFSGKGKCRNVSTVHCTHGIKPVVTTQLIINGSLATENITVRVNNASKNTHDWIVQLSTAVNLTCKRVGNNTRGKVQIGPGMTFYNMDHIFGDTRKAFCELNGTTWNETLQKVRESLIKEIKANANGTYNITFEPSSGGDPEIANHMFNCGGEFFYCDTRKMFNESEPFHENMTIPCRIRQIVNSWMRVGRGIYAPPIPGHITCNSLITGLILTRDHVNNTNNTFRPIGGDMKNIWRSELYKYKVVRIEPLSVAPTKAKRHTVGERRQKRAAFGLGALFLGFLGAAGSTMGAAAVTLTVQARQLLSGIVQQQNNLLRAIEAQQHLLQLTVWGVKQLQARLLAVERYLQDQQILGLWGCSGKSICYTTVPWNKTWSGKSMSDIWNNLTWQQWDKLITNYTGTIFGLLEEAQSQQEKNEKDLLELDQWASLWNWFDITNWLWYIKIFLMAVGGIIGLRIIMSVVSVIRRVRQGYSPLSLQTLIPAQREPGTLGETGGEGGEPGSGRSVRLVTGCWPLIWDDLRNLVIWSYRSLTSLACIVWRQLEKLGQLLINILRLIQEKLTLLRGIIQYWGRELRTSATSLLDATAIAVGEGTDRIIRAVQIVFRIIGNIPRRIRQGLERTLL

SEQ ID NO: 161 - protein, 856 aa, synthetic construct
MKVMEERKRSFNGFYMTMTICMALLIPCLTSDEWVTVYYGVPVWREVNTVLFCASDAKAHSTEAHNIWATHACVPTDPNPQEVVLHNVTEDFNMWNNQMVEQMQEDISSLWDQSLKPCVKLTPLCVTMHCSNVTRQNSTSNNNTSGKNETGVLQMKNCTFNTTTELRDKRRKVYSLFYVDDLQSLGSGTGDTYTMINCNTTAITQACPKVSFEPIPIHYCAPAGFAILKCNDVNFSGKGKCRNVSTVHCTHGIKPVVTTQLIINGSLATENITVRVNNASKNTHDWIVQLSTAVNLTCKRVGNNTRGKVQIGPGMTFYNMDHIFGDTRKAFCELNGTTWNETLQKVRESLIKEIKANANGTYNITFEPSSGGDPEIANHMFNCGGEFFYCDTRKMFNESEPFHENMTIPCRIRQIVNSWMRVGRGIYAPPIPGHITCNSLITGLILTRDHVNNTNNTFRPIGGDMKNIWRSELYKYKVVRIEPLSVAPTKAKRHTVGERRQKRAAFGLGALFLGFLGAAGSTMGAAAVTLTVQARQLLSGIVQQQNNLLRAIEAQQHLLQLTVWGVKQLQARLLAVERYLQDQQILGLWGCSGKSICYTTVPWNKTWSGKSMSDIWNNLTWQQWDKLITNYTGTIFGLLEEAQSQQEKNEKDLLELDQWASLWNWFDITNWLWYIKIFLMAVGGIIGLRIIMSVVSVIRRVRQGYSPLSLQTLIPAQREPGTLGETGGEGGEPGSGRSVRLVTGCWPLIWDDLRNLVIWSYRSLTSLACIVWRQLEKLGQLLINILRLIQEKLTLLRGIIQYWGRELRTSATSLLDATAIAVGEGTDRIIRAVQIVFRIIGNIPRRIRQGLERTLL

SEQ ID NO: 162 - protein, 849 aa, synthetic construct
MKVMEERKRSFNGFYMTMTICMALLIPCLTSDEWVTVYYGVPVWREVNTVLFCASDAKAHSTEAHNIWATHACVPTDPNPQEVVLHNVTEDFNMWNNQMVEQMQEDISSLWDQSLKPCVKLTPLCVTMHCSTLKNNTSGKNKTGVLQMKNCTFNTTTELRDKRRKVYSLFYVDDLQSLGRGTGDTYTMINCNTTAITQACPKVSFEPIPIHYCAPAGFAILKCNDVNFSGKGKCRNVSTVHCTHGIKPVVTTQLIINGSLATENITVRVNNASKNTHDWIVQLSTAVNLTCKRVGNNTRGKVQIGPGMTFYNMDHIFGDTRKAFCELNGTTWNETLQKVRESLIKEIKANANGTYNITFEPSSGGDPEIANHMFNCGGEFFYCNTSKMFNESEPFHENMTIPCRIRQIVNSWMRVGRGIYAPPIPGNITCNSLITGLILTRDHVNNTNNTFRPIGGDMKNIWRSELYKYKVVRIEPLSVAPTKAKRHTVGERRQKRAAFGLGALFLGFLGAAGSTMGAAAVTLTVQARQLLSGIVQQQNNLLRAIEAQQHLLQLTVWGVKQLQARLLAVERYLQDQQILGLWGCSGKSICYTTVPWNKTWSGKSMSDIWNNLTWQQWDKLITNYTGTIFGLLEEAQSQQEKNEKDLLELDQWASLWNWFDITNWLWYIKIFLMAVGGIIGLRIIMSVVSVIRRVRQGYSPLSLQTLIPAQREPGTLGETGGEGGEPGSGRSVRLVTGCWPLIWDDLRNLVIWSYRSLTSLACIVWRQLEKLGQLLINILRLIQEKLTLLRGIIQYWGRELRTSATSLLDATAIAVGEGTDRIIRAVQIVFRIIGNIPRRIRQGLERTLL

SEQ ID NO: 163 - protein, 844 aa, synthetic construct
MKVMEERKRSFNGFYMTMTICMALLIPCLTSDEWVTVYYGVPVWREVNTVLFCASDAKAHSTEAHNIWATHACVPTDPNPQEVVLHNVTEDFNMWNNQMVEQMQEDISSLWDQSLKPCVKLTPLCVTMHCSTLKGKNKTGVLQMKNCTFNTTTELRDKRRKVYSLFYVDDLQSLGRGKGTYTMINCNTTAITQACPKVSFEPIPIHYCAPAGFAILKCNDVNFNGTGKCRNVSTVHCTHGIKPVVTTQLIINGSLATENITVRVNNASKNTHDWIVQLSTAVNLTCKRVGNNTRGKVQIGPGMTFYNMDHIFGDTRKAFCELNGTTWNETLQKVRESLIKEIKANANGTYNITFEPSSGGDPEIANHMFNCGGEFFYCNTSKMFNESEPFHENMTIPCRIRQIVNSWMRVGRGIYAPPIPGNITCNSLITGLILTRDHVNNTNNTFRPIGGDMKNIWRSELYKYKVVRIEPLSVAPTKAKRHTVGERRQKRAAFGLGALFLGFLGAAGSTMGAAAVTLTVQARQLLSGIVQQQNNLLRAIEAQQHLLQLTVWGVKQLQARLLAVERYLQDQQILGLWGCSGKSICYTTVPWNKTWSNKSMSDIWNNLTWQQWDKLITNYTGTIFGLLEEAQSQQEKNEKDLLELDQWASLWNWFDITNWLWYIKIFLMAVGGIIGLRIIMSVVSVIRRVRQGYSPLSLQTLIPAQREPGTLGETGGEGGEPGSGRSVRLVTGCWPLIWDDLRNLVIWSYRSLTSLACIVWRQLEKLGQLLINILRLIQEKLTLLRGIIQYWGRELRTSATSLLDATAIAVGEGTDRIIRAVQIVFRIIGNIPRRIRQGLERTLL

SEQ ID NO: 164 - DNA, 2013 bp, synthetic construct
  source 1..2013: mol_type = other DNA
atggatgctatgaagaggggcctgtgctgcgtgctgcttctgtgtggcgctgtgtttgtgtcccctagccaagagatccacgccagattcagaagaggcgccagagccgagaagctgtgggtcacagtgtactacggcgtgccagtttggagagaggccgacaccacactgttctgtgcctctgatgccaagggctacgacacagaggcccataacgtgtgggccactcatgcctgcgtgcccacagatcctagacctcaagagatgtacctggaaaacgtgaccgagaacttcaacatgtggaagaacagcatggtcgagcagatgcacaccgacatcatcagcctgtgggacgagagcctgaagccttgcgtgaagctgacccctctgtgcgtgacactggactgcagcacctacaacaacacccacaacatcagcaaagagatgaagaactgcagcttcaatatgaccaccgagctgcgggacaagcggcagaaggtgtacagctttttctacaagaccgacattgagcagatcaacaagaacggccggcagtaccggctgatcaactgcaataccagcgcctgcactcaggcctgtcctaaggtgtccttcgagcctattcctatccacttctgtgcccctgccggcttcgccatcctgaagtgcaatgagaagcacttcaacggcactggcccctgcaagaacgtgtccaccgtgcagtgtacccacggcatcaagccagtggtgtctacccagctgctgctgaatggctctctggccgaagaagaggtggtcatcagagtggaaaacaccaccgacaacgccaagaccatcatcgtgcagctgaacgagacagtgaagatcaattgcacccggccgaacaacaataccagaaagagcatccggatcggccctggccagaccttttatgccaccggcgatatcatcggcaacatccggaaggcctactgcaatgtgtccaagagagagtggaacaataccctgcagcaggtcgccgctcagctgtccaagtcctttaacaacaccaagatcgtgttcgagaagcacagcggaggcgacctggaagtgatcacacacagctttgtctgtggcggcgagttcttctactgcaacacctccggcctgttcaactccacctggaccaacagcacctggacaaactctaccaccggcagcaatggcaccgagagcaacgacaccatcactctgcagtgcgagatcaagcagttcatcaatatgtggcagcgcgtcggccggtgtatgtacgctcctcctattcctggcgtgatcagatgcgagtccaacatcacaggcctgctgctcaccagagatggccccaatagcacccagaacgaaaccttcagacctggcggcggagacatgagagacaattggagaagcgagctgtacaagtacaaggtggtgcagatcgagcccctgggcgttgcacctacacactgcaaacgcagagtggtggaaagacggcgaaggcggagagctgttggactgggcgcagtgttctttggctttctgggagccgccggaagcacaatgggagctgcctctatcaccctgaccgtgcaggctagacagctgctgagcggaattgtgcagcagcagagcaacctgctgaaggcccctgaagctcagcaacagctgctcagactgaccgtgtggggaatcaaacagctgcaggccagagtgctggccctcgagagatacctgaaagaccagcagctcctcggaatctggggctgttctggcaagctgatctgctgcaccacagtgccctggaacagctcctggtccaacaagaattacaccgatatctgggacaacatgacctggctgcagtgggacagagagatcagcaactacaccgacgagatctatcggctgatcgagcagagccagaaccagcaagagaagaacgagcaggacctgctggctctggacggatctggactgccttctactggcggatgatga

SEQ ID NO: 165 - DNA, 1980 bp, synthetic construct
  source 1..1980: mol_type = other DNA
atgcctatgggatctctgcagcctctggccacactgtacctgctgggaatgctggtggcttctgtgctggccgccgagaagctgtgggtcacagtgtattatggcgtgcccgtgtggcgcgaggccgataccacactgttttgtgcctctgacgccaagggctacgacacagaggcccataatgtgtgggccactcacgcctgcgtgcccacagatcctagacctcaagagatgtacctggaaaacgtgaccgagaacttcaacatgtggaagaacagcatggtcgagcagatgcacaccgacatcatcagcctgtgggacgagagcctgaagccttgcgtgaagctgacccctctgtgcgtgacactggactgcagcacctacaacaacacccacaacatcagcaaagagatgaagaactgcagcttcaatatgaccaccgagctgcgggacaagcggcagaaggtgtacagctttttctacaagaccgacattgagcagatcaacaagaacggccggcagtaccggctgatcaactgcaataccagcgcctgcactcaggcctgtcctaaggtgtccttcgagcctattcctatccacttctgtgcccctgccggcttcgccatcctgaagtgcaatgagaagcacttcaacggcacaggcccctgcaagaacgtgtccaccgtgcagtgtacccacggcatcaagccagtggtgtctacccagctgctgctgaatggctctctggccgaagaagaggtggtcatcagagtggaaaacaccaccgacaacgccaagaccatcatcgtgcagctgaacgagacagtgaagatcaattgcacccggccgaacaacaataccagaaagagcatccggatcggccctggccagaccttttatgccaccggcgatatcatcggcaacatccggaaggcctactgcaatgtgtccaagagagagtggaacaataccctgcagcaggtcgccgctcagctgtccaagtcctttaacaacaccaagatcgtgttcgagaagcacagcggaggcgacctggaagtgatcacacacagcttcgtgtgtggcggcgagttcttctactgcaacacctccggcctgttcaactccacctggaccaacagcacctggacaaactctaccaccggcagcaatggcaccgagagcaacgacaccatcactctgcagtgcgagatcaagcagttcatcaatatgtggcagcgcgtcggccggtgtatgtacgctcctcctattcctggcgtgatcagatgcgagtccaacatcacaggcctgctgctcaccagagatggccccaatagcacccagaacgaaaccttcagacctggcggcggagacatgagagacaattggagaagcgagctgtacaagtacaaggtggtgcagatcgagcccctgggcgttgcacctacacactgcaaacgcagagtggtggaaagacggcgaaggcggagagctgttggactgggcgctgtgttctttggctttctgggagccgccggaagcacaatgggagctgcctctatcaccctgaccgtgcaggctagacagctgctgagcggaattgtgcagcagcagagcaacctgctgaaggcccctgaagctcagcaacagctgctcagactgaccgtgtggggaatcaaacagctgcaggccagagtgctggccctcgagagatacctgaaagaccagcagctcctcggcatctggggctgttctggcaagctgatctgctgcaccacagtgccctggaacagctcctggtccaacaagaattacaccgatatctgggacaacatgacctggctgcagtgggacagagagatcagcaactacaccgacgagatctatcggctgatcgagcagagccagaaccagcaagagaagaacgagcaggacctgctggctctggacggatctggactgccttctactggcggatgatga

SEQ ID NO: 166 - DNA, 1965 bp, synthetic construct
  source 1..1965: mol_type = other DNA
atgggctggtcctgcatcatcctgtttctggtggccacagccacaggggtgcacgccgctgaaaaactgtgggtcacagtgtactacggcgtgcccgtttggagagaggccgacaccacactgttttgtgcctccgatgccaagggctacgacacagaggcccataacgtgtgggccactcatgcctgcgtgcccacagatcctagacctcaagagatgtacctggaaaacgtgaccgagaacttcaacatgtggaagaacagcatggtcgagcagatgcacaccgacatcatcagcctgtgggacgagagcctgaagccttgcgtgaagctgacccctctgtgcgtgacactggactgcagcacctacaacaacacccacaacatcagcaaagagatgaagaactgcagcttcaatatgaccaccgagctgcgggacaagcggcagaaggtgtacagctttttctacaagaccgacattgagcagatcaacaagaacggccggcagtaccggctgatcaactgcaataccagcgcctgcactcaggcctgtcctaaggtgtccttcgagcctattcctatccacttctgtgcccctgccggcttcgccatcctgaagtgcaatgagaagcacttcaacggcacaggcccctgcaagaacgtgtccaccgtgcagtgtacccacggcatcaagccagtggtgtctacccagctgctgctgaatggctctctggccgaagaagaggtggtcatcagagtggaaaacaccaccgacaacgccaagaccatcatcgtgcagctgaacgagacagtgaagatcaattgcacccggccgaacaacaataccagaaagagcatccggatcggccctggccagaccttttatgccaccggcgatatcatcggcaacatccggaaggcctactgcaatgtgtccaagagagagtggaacaataccctgcagcaggtcgccgctcagctgtccaagtcctttaacaacaccaagatcgtgttcgagaagcacagcggaggcgacctggaagtgatcacccacagctttgtgtgtggcggcgagttcttctactgcaacacctccggcctgttcaactccacctggaccaacagcacctggacaaactctaccaccggcagcaatggcaccgagagcaacgacaccatcactctgcagtgcgagatcaagcagttcatcaatatgtggcagcgcgtcggccggtgtatgtacgctcctcctattcctggcgtgatcagatgcgagtccaacatcacaggcctgctgctcaccagagatggccccaatagcacccagaacgaaaccttcagacctggcggcggagacatgagagacaattggagaagcgagctgtacaagtacaaggtggtgcagatcgagcccctgggcgttgcacctacacactgcaaacgcagagtggtggaaagacggcgaaggcggagagctgttggactgggcgctgtgttctttggctttctgggagccgccggaagcacaatgggagctgcctctatcaccctgaccgtgcaggctagacagctgctgagcggaattgtgcagcagcagagcaacctgctgaaggcccctgaagctcagcaacagctgctcagactgaccgtgtggggaatcaaacagctgcaggccagagtgctggccctcgagagatacctgaaagaccagcagctcctcggcatctggggctgttctggcaagctgatctgctgcaccacagtgccctggaacagctcctggtccaacaagaattacaccgatatctgggacaacatgacctggctgcagtgggacagagagatcagcaactacaccgacgagatctatcggctgatcgagcagagccagaaccagcaagagaagaacgagcaggacctgctggctctggacggatctggactgccttctactggcggatgatga

SEQ ID NO: 167 - DNA, 1971 bp, synthetic construct
  source 1..1971: mol_type = other DNA
atgcctatgggctctctgcagcccctggccacactgtacctgctgggcatgctggtggccagcgtgctggccgctgaaaacctgtgggtgaccgtgtactacggcgtgcctgtttggaaagaagccaagaccaccctgttctgcgcctctgacgccaaggcctacgagaagaaggtgcacaacgtgtgggccacccacgcctgtgtgccgacagatcctaacccccaggagatggtcctgaagaacgtgacagagaacttcaacatgtggaagaacgacatggtggaccagatgcacgaggacgtgatctctctttgggatcagagcctgaaaccttgtgtgaagctgacacctctgtgcgtgaccctggattgctctacatacaacaacacacacaatatcagcaagggcatgaaaaactgcagctttaacatcaccaccgaactgagagataagcggagaaaggtcaacgccctgttctacaagctggacatagtgcaactgaacaagaacggcagacagtacagactgatcaactgtaataccagcgccatcactcaggcctgccccaaggtctccttcgaccccatccccatccactactgcgcccctgccggctatgctatcctgaagtgcaacaacaaaaccttcaacggcaccgggccttgcaacaacgtgtccactgtgcagtgcacccacggcattaagcccgtggtgagcacccagctgctgctgaacggcagcctggccgagggcgagatcatcatcagaagcgaaaatatcaccaacaatgtgaaaaccatcatcgtccatctgaatgagagcgtgaaaatagagtgtaccagaccaaacaacaagaccaggaagagcatcagaatcggccctggccagtggttctatgccacaggcgatgtgatcggcgacatccgggaagcttattgtaacatctctaaaagcaagtggaacgagacactgcaaagagtgtctaagaagctgaaggaatacttcccccacaagaacatcacctttcagcctagctccggcggcgacctggaaatcacaacccacagtttcaattgcggcggagagttcttctactgcaacaccagcagccttttcaaccggacatacatggccaattccacagacatggcaaacagcacagaaaccaacagcaccagaacaatcacaatccactgcagaatcaaacagatcattaacatgtggcaggaggtgggccgggccatgtacgcccctcctatcgccggcaacatcacctgtatcagcaacatcaccggcctgctgctgacccgcgacggcggaaagaacaataccgagacattccggcctggaggaggcaacatgaaagacaactggcggagcgagctgtacaagtacaaggtggttaagatcgagcctctgggcgtggcccctaccagatgcaagagacgggtggtgggaagaaggcggcggagaagagccgtgggcattggcgccgtgttcctgggatttctgggagctgctggaagcacaatgggagccgctagcatgaccctcacagtgcaggcccggaacctgctgtctggcatcgtgcagcaacaatccaatctgctgcgggccccagaggcccagcaacacctgctgaagctgaccgtgtggggcatcaagcagctgcaggccagagtgctggctgtcgagagatacctgagagatcagcagctcctgggcatctggggctgtagcggcaagctgatctgctgcaccaacgtgccatggaactctagctggtccaacagaaacctgagcgagatctgggataacatgacctggctgcagtgggacaaggaaatcagcaattacacacagatcatctacggcctgcttgaggaaagccagaaccagcaggagaaaaatgaacaggacctgctggctctggacggcagcggcctgcctagcaccggcggttgatga

SEQ ID NO: 168 - DNA, 1992 bp, synthetic construct
  source 1..1992: mol_type = other DNA
atggacgccatgaaaagaggcctgtgttgcgtgctgctgctgtgcggcgccgtgttcgtgtcgccttctcaggagatccacgccagattcagaagaggcgcgagactgtgggtgacagtgtactacggcgttccagtgtggagagaagctaagaccacactgttctgcgcctctgacgccaagtcctacgagaaggaagtgcacaacgtgtgggccacacatgcctgcgtgccaacagatcccaacccccaggagctggtgctgaaaaacgtgaccgagaacttcaatatgtggaagaacgacatggtggaccagatgcacgaggacatcatcagcctgtgggaccagtcactgaaaccttgcgtgaagctcacccctctgtgcgtgaccctgcactgctctacatataacaacacacacaacatctccaaggaaatcaagaactgcagcttcaacgccacaacagaactgagggacaagcggaaaaaggagtacgccctgttctaccgactggatatcgtgcccctgaacaaaaacggcagacagtacagactgatcaactgcaataccagcgtgtgcacccaggcttgtcctaaggtgaccttcgaccccatccctatccactactgcgccccagccggctacgccatcctgaagtgcaacaacaagaccttcaacggcacgggaccttgtaacaacgtcagcaccgtccagtgcacacacggcatcaaacccgtggtgtccacccagctactgcttaatggcagcctggccgaggaagaaatcatcattagaagcgaaaacctgaccgataatgtgaaaaccatcatcgttcacctgaacgagagcgtggaaatcaactgtaccagacctaacaacaacacccggaagagcatccggatcggccccggccagaccttttacgccaccggcgacatcattggcgatatcagacaggcccactgtaacatcagcgagatcaagtggaataagaccctgcagcgggtgtccgaaaagctgagagagcacttcaacaagactatcatcttcaaccagagcagcggcggggacctggaaatcaccacccattatttcaactgcggcggcgaattcttctattgtaataccagcgacctttttttcaacaagaccttcaacgagacatacagcaccggcagcaacagcactaacagcaatatcacactgccctgtagaatcaaacagatcatcaacatgtggcaggaggtgggccggtgcatgtacgccagccctattgccggcgagatcacatgcaagtctaatatcacaggactgctgctgacaagagatggaggaggcaacaatagcaccgaagagacatttcggcctggaggtggcaacatgcgggacaattggcggagcgagctgtacaagtacaaggtggtcgaggtgaagcctctgggcatcgcccctaccgagtgcagaagacgggtggtgcagagacggcggagacgcagagccgtggtcggcctgggagctgtgtttctgggcttcctgggcaccgccggcagcaccatgggcgctgcttctatcaccctgaccgtccaggccagacagctgctgagcggaatcgtgcaacaacaaagcaatctgctgcgagcccctgaggcccagcaacacatgctgcagctgaccgtgtggggcatcaagcagctgcaagccagagtcctggctatcgagagatacctgaaggatcagcagctgttgggaatgtggggttgttctggcaagctgatctgctgcaccaacgtgtactggaactctagctggtccaacaagacatacaatgagatctgggataacatgacctggatgcagtgggacagagagatcgacaactacaccgatacaatctacaagctgctggaagtgtctcagaagcagcaggaaagcaacgagaaagacctgctggctctggacggcagcggccttcctagcaccggcggctgatga

SEQ ID NO: 169 - DNA, 1959 bp, synthetic construct
  source 1..1959: mol_type = other DNA
atgcctatgggcagcctgcaacctcttgctacactgtacctgctgggcatgctggtcgcctccgtgctggctctgtgggtcaccgtgtactacggcgtgcctgtgtggagagaggccaagaccaccctgttttgcgcctctgatgccaaaagctacgagaaggaagtgcacaacgtgtgggccacccacgcctgcgtgcccaccgatcctaacccccaggagctggtgcttaagaacgtgacagaaaacttcaacatgtggaagaacgacatggtggaccagatgcacgaagatatcatcagcttgtgggaccagtctctgaaaccctgcgtgaagctcacccctctgtgcgtgaccctgcactgctctacctacaacaacactcataatatcagcaaggagataaaaaactgtagcttcaacgccaccaccgagctgcgggacaagcggaagaaggaatacgccctgttctaccggctggatatcgtgccactgaacaaaaatggccggcagtacagactgatcaactgcaataccagcgtgtgcacccaggcatgccccaaggtgaccttcgaccctatccctatccactactgtgcccctgccggctacgccatcctgaaatgcaacaacaagacatttaatggcaccggcccttgtaacaacgtgagcaccgtgcagtgcacacatggcatcaagcctgtggtgagcacccagctcctgctgaacggatctctggccgaggaagagatcatcatcagaagcgagaacctgacagataacgttaaaaccatcatcgtgcacctgaacgaaagcgttgagatcaattgtacacgccccaacaacaacacaagaaagagcatccggatcggccccggccagaccttttatgccacaggcgatatcattggcgacatcagacaggcccactgtaatatctccgaaatcaagtggaacaagaccctgcagagagtgtctgagaagctgagagaacacttcaacaagacgatcattttcaaccagagctctgggggcgacctggaaatcacaacccactacttcaactgcggcggcgagttcttctattgtaatacaagcgacctgttcttcaacaaaacattcaatgaaacctacagcacaggcagcaactccaccaacagcaatatcacactgccttgcagaatcaagcaaatcattaacatgtggcaggaggtgggcagatgcatgtacgccagccctatcgccggagagatcacatgcaagagcaatatcaccggactgctgctgaccagagatggcggaggcaacaacagcaccgaggaaacctttagacctggcggcggcaacatgcgggacaactggcggtccgagctgtacaagtacaaggtggtggaagtcaagcccctgggaattgctcctacagagtgcagaagaagggtggttcagcggagaaggcggagaagagccgtggtcggcctcggcgccgtgttcctgggcttcctgggcaccgccggaagtaccatgggagccgccagcatcaccctgaccgtgcaggccagacagctgctgagcggaatcgtgcaacagcagagcaacctgctccgggctcctgaggcccagcagcacatgctgcagctgaccgtgtggggcatcaagcagctgcaggctagagtgctggccatcgagagatacctgaaggaccagcagctgctgggcatgtggggctgttctggcaagctgatctgctgcacaaacgtgtattggaatagcagctggtccaacaagacatacaacgagatctgggataatatgacctggatgcagtgggaccgggagatcgacaactacacagacaccatctacaaactgctggaagtgtctcagaagcagcaagagagcaacgagaaagacctgctggctctggacggcagcggcctgccatccaccggaggctgatga

SEQ ID NO: 170 - DNA, 1944 bp, synthetic construct
  source 1..1944: mol_type = other DNA
atgggatggtcttgtatcatcctgtttctggtcgccaccgccaccggcgtgcatgccctgtgggtcaccgtgtactacggcgtgccagtgtggagagaagctaaaaccacattgttttgcgccagcgacgccaagtcctacgagaaggaagtgcacaacgtgtgggccacacacgcctgcgttccaacagaccccaacccacaggagctggtgctgaagaacgtcaccgaaaatttcaacatgtggaagaacgacatggtggaccagatgcacgaggacatcatcagcctgtgggatcagtcactgaaaccttgtgtgaagctgacccctctgtgcgtcacactgcactgtagcacctataacaacacccacaacatctctaaggaaatcaaaaactgcagcttcaacgctacaaccgagctgcgggataagcggaaaaaggagtacgccctgttctaccggctggacatcgtgcctctgaacaagaacggcagacagtacagactgatcaactgcaataccagcgtgtgtacacaggcttgtcctaaggtgacattcgaccctatccccatccactactgcgcccccgccggctacgccatcctgaagtgcaacaacaaaacattcaacggcacaggaccttgcaacaacgtgtccaccgtgcagtgcacacacggcattaagcccgtggtgtctacccagctgctgctgaatggctctctggccgaggaagagatcatcatcagatccgaaaatctgacagataatgtgaagacaatcatcgtgcacctgaacgagtccgtggaaatcaactgtaccagacctaacaacaatacccggaagagcatccggattggccctggccagaccttttacgctaccggcgacatcatcggcgatatcagacaggcccactgcaacatcagcgagattaagtggaataagaccctgcagagagtgtctgaaaagctgagagagcacttcaacaagaccatcatcttcaaccagtccagcggcggcgatctggaaatcacgacccattatttcaattgcggcggagagttcttctattgcaacacatccgacctgttcttcaacaagaccttcaacgagacatacagcaccggcagcaacagcacgaacagcaacatcaccctgccctgtagaatcaagcagatcatcaacatgtggcaggaggtgggccgctgcatgtacgcctctcctatcgccggagaaatcacgtgcaagtctaacattaccggcctgctgctcacccgggacggcggcggcaacaacagcaccgaggagacatttagacccggcggcggcaatatgcgggacaattggcggagcgagctgtacaaatacaaggtggttgaagtgaaacctctgggaatcgcccctactgagtgcagaagaagagtggtgcagagaaggcggcggcggagagccgtggtcggcctcggcgctgtgttcctgggcttcctgggcaccgccggcagcaccatgggcgccgccagtatcaccctgaccgtgcaagctagacaactgctgagcggtatcgtgcagcagcaaagcaatctgctgagagccccggaagcccagcagcacatgctgcaactgacagtgtggggaatcaagcagctgcaggctagagtgctggccatcgagcggtacctgaaagaccagcagctgctgggaatgtggggctgtagcgggaagctgatctgctgcaccaacgtgtactggaacagcagctggagcaacaagacatacaacgaaatttgggacaacatgacctggatgcagtgggacagagagatcgacaactacaccgataccatctacaagctgctcgaggtgagccagaagcaacaggagagcaacgagaaggacctgctggccctggatggcagcggattgcctagcacaggaggctgatga

SEQ ID NO: 171 - DNA, 1944 bp, synthetic construct
  source 1..1944: mol_type = other DNA
atgggatggagctgcatcatcctgtttctggtcgccacggccaccggagtgcacgccctgtgggtgaccgtgtactacggcgtgccagtgtggagagaggcctgcaccaccctgttctgcgcctctgacgctaagtcctacgagaagaaagtcagaaacgtgtgggccacccattgttgtgtgcccaccgatcctaaccctcaggagctggttctgaaaaacgtgaccgaaaacttcaacatgtggaagaacgacatggtggaccagatgcacgaggacatcatcagcctgtgggaccagagcctgaagccttgcgtgaaactgacccctctgtgcgtgaccctgcactgcagcacctacaacaacacacataatatctcaaaggagatcaagaactgcagcttcaacgccaccacagagctgcgcgacaagcggaagaaggaatacgccctgttctacagactggatatcgtgcctctgaacaagaatggcagacagtacagactgatcaactgcaataccagcgtgtgcacccaagcttgtcctaaggtgacattcgaccccattcccatccactactgcgcccctgccggttatgctattctgaaatgcaacaacaaaacctttaacggcacaggcccctgtaacaacgtgagcacagtgcaatgtacacacggcatcaagcctgtggtgtctacccagctgctgctgaacggcagcctggccgaggaagaaataatcatcagatctgaaaatctgacagacaacgtgaagaccatcatcgtccacctgaacgaaagcgtggaaattaactgcacacggcccaacaacaataccagaaagtctatccggatcggacctggccagtggttctacgccaccggcgacatcatcggcgatatccggcaggcccactgtaatatcagcgagattaaatggaacaagaccctgcagcgggtgagcgagaagctgagagagcacttcaacaagacaatcatcttcaaccagtctagcggcggagatctggaaatcacaacacactacttcaactgcggcggcgagttcttctattgtaatacatctgatctgtttttcaacaagaccttcaatgaaacctacagcaccggcagcaacagcaccaacagcaatatcacactgccttgtagaatcaaacagatcatcaacatgtggcaggaggtgggcagatgcatgtacgcttctccaatcgccggcgaaatcacatgcaagagcaacatcaccggactgctgttaaccagagatggcggcggcaacaacagcaccgaagagacatttcggcctggaggcggcaacatgagagacaattggcggagcgagctgtacaagtataaggtggtggaagtcaagcccctgggcatcgccccaactgagtgcagacggcgagtggtgcagagacggagaagaagacgggccgttgtgggactgggcgctgttttcctgggcttcctgggcacagccggaagcactatgggcgccgccagcatcaccctcacagtgcaggccagacagctgctgagcggcatcgtgcagcagcagagcaactgcctgagggcccctgagtgccagcagcacatgctgcagctgaccgtgtggggcatcaagcagctgcaagctagagtgctggccatcgagagatacctgaaggaccaacaactgctgggaatgtggggttgttctggcaagctcatctgctgcaccaatgtgtactggaacagcagctggtccaataagacctacaacgagatctgggacaacatgacctggatgcagtgggatagagagatcgacaactacacagacaccatctacaagctgctggaagtgtcccagaagcagcaggagtccaacgagaaagacctgctggccctggacggctctggcttgcccagcactggaggctgatga

SEQ ID NO: 172 - DNA, 1959 bp, synthetic construct
  source 1..1959: mol_type = other DNA
atgcctatgggctccctgcaaccactggctactctgtacctgctgggcatgctggtggccagcgtgctggccctgtgggtgaccgtgtattacggcgtcccagtgtggagggaagcctgtaccaccctgttctgcgccagcgacgccaagagctacgagaagaaagtgcggaacgtgtgggccacacactgctgcgtgcccacagatcctaacccccaggagctggtgctgaaaaacgttacagaaaacttcaacatgtggaagaacgacatggtggaccagatgcacgaggacattatcagcctgtgggatcagagcctgaagccctgcgtgaaactgacccctttgtgcgtgacactgcactgctctacctacaacaacacccacaacatcagcaaggaaatcaagaattgcagcttcaacgccaccaccgagctgagagataagcggaagaaggaatacgcacttttttatcgcctcgacattgtgcctctgaacaagaatggcagacaatacagactgatcaactgcaacacatctgtttgtacacaggcctgccccaaggtgacattcgaccccatccccatccactactgcgcccctgccggctacgccatcctgaagtgcaacaacaagaccttcaacggcaccggcccttgcaacaacgtgagcaccgtgcaatgtacccatggcatcaagcctgtggtgtccacccagctgctgctgaacggcagcctggccgaggaagagatcatcatcagaagcgaaaacctgaccgacaacgtgaagaccatcatcgtgcacctgaatgagtctgtggaaattaactgcacccggccaaacaacaacaccagaaagagcatccggatcggccccggccagtggttctacgccaccggcgacatcatcggcgacatccggcaggcccactgtaacatctctgaaatcaagtggaacaaaacattgcagagagtgtccgaaaaactgagagagcacttcaacaagacgatcatcttcaaccagagcagcggcggcgatctggaaatcaccacacactacttcaattgcggcggcgagttcttctattgtaatacctccgatctgtttttcaacaagaccttcaacgagacatacagcaccggcagcaacagcacaaatagcaacatcacactcccttgtagaatcaaacagatcatcaacatgtggcaggaggtgggccgttgcatgtacgccagccctatcgccggagagatcacatgcaagagcaatatcacaggcctgcttctgacaagagacggcgggggaaataacagcaccgaggaaacctttagacctggcggaggcaacatgagagataattggcggagcgagctgtacaaatacaaggtggtcgaggtcaagcctctgggcatcgcccctaccgaatgcagaagacgggtggtgcagcggcgtagacggcggagagccgtcgttggcctgggagctgtgttcctgggctttctgggtaccgccggcagcaccatgggcgccgcttccatcacactgaccgtgcaagctagacagctgctgtctggaatcgtgcagcagcaaagcaactgtctgagagcccctgagtgccagcagcacatgctgcagctgacggtgtggggcatcaagcagctgcaggccagagtgctggctatcgagcggtacctgaaggaccagcagctgctgggcatgtggggatgtagcggcaagctgatctgctgcaccaacgtgtactggaacagttcttggagcaacaaaacctacaacgagatttgggacaatatgacctggatgcagtgggatagagagatcgacaactacaccgacaccatatacaagctgctggaagtgtctcagaagcagcaggagagcaacgaaaaggatctgctggctctggacggcagcggcctgcctagcacaggcggatgatga

SEQ ID NO: 173 - DNA, 1992 bp, synthetic construct
  source 1..1992: mol_type = other DNA
atggacgccatgaaaagaggcctgtgctgcgtgcttctgctctgcggcgccgtgtttgtgtctcctagccaggagatccacgccagattcagacggggcgcccggttgtgggttaccgtgtactacggcgtgccagtgtggcgggaagcctgcaccacactgttctgcgcctctgatgcgaagagctacgagaaaaaggtgcggaacgtgtgggccacacattgctgcgtccctaccgatcctaatcctcaggagctggtgctgaagaacgtgacagaaaacttcaacatgtggaagaacgacatggtggaccagatgcacgaggacattatcagcctgtgggaccaaagcctgaaaccctgtgtgaagctgacgcccctgtgcgtaaccctgcactgtagcacctacaacaacacacacaacatcagcaaggaaatcaagaattgttccttcaacgccaccaccgagctgagagataagcggaagaaagagtatgccctgttctacagactggatatcgtgcctctgaacaaaaatggcagacagtaccggctgatcaactgcaacacctctgtttgtacccaggcttgtcctaaggtcacatttgaccctatccccatccactattgtgccccagccggctacgccatcctgaagtgcaacaacaagacctttaacggcaccggcccttgtaacaatgttagcaccgtgcagtgcacacacggcatcaagcctgtggtgtctacccagctgctgctgaacggctccctggccgaggaagaaatcatcatcagatccgagaacctgactgacaatgtcaaaacaatcattgtgcacctgaatgagagcgtggaaatcaactgcaccagacctaacaacaacaccaggaaatccatccggatcggccctggccagtggttctacgccaccggcgacatcatcggcgacattaggcaggcacattgtaacatcagcgagatcaagtggaacaagacactgcagcgggtgtccgagaagctgagagagcacttcaacaagaccatcatcttcaaccagtctagcggcggcgatctggaaatcacaacccactacttcaactgcggcggcgaattcttctactgcaataccagcgacctgtttttcaacaagaccttcaacgagacatacagcacaggcagcaatagcaccaatagcaatatcaccctgccttgcagaatcaagcagatcatcaacatgtggcaggaggtgggccggtgcatgtacgccagccctatcgctggagaaattacatgcaagtccaacattaccggcctgctgctgacaagagatggcggtggcaacaactctacagaagagacattccgccccggcggcggcaacatgagagacaactggagaagcgagctgtacaagtacaaggtagtggaagtgaagccactgggaatcgcccccaccgagtgtagaagaagagtggtccagagaagacggcgccggagagccgtggtgggactgggcgctgtgttcctgggcttcctggggaccgccggcagcaccatgggagccgctagcatcaccctgacggtgcaggccagacagctgctgagcggcatcgtgcagcagcagagcaattgcctgcgggcccctgagtgccagcagcacatgctgcagctgaccgtgtggggcatcaaacagctgcaagccagggtgctcgctatcgagagatacctgaaggatcagcaactcctcggaatgtggggctgctctggcaagctgatctgctgtaccaacgtgtattggaatagctcttggagcaacaagacctacaacgagatctgggacaacatgacatggatgcagtgggatagagaaatcgacaactacaccgacaccatctacaagctgctggaagtgtcccagaagcaacaggaaagcaacgagaaggacctgctggccctggacggctcaggactgcccagcaccggaggatgatga

SEQ ID NO: 174 - DNA, 2004 bp, synthetic construct
  source 1..2004: mol_type = other DNA
atgcctatgggatctctgcagcctctggccacactgtacctgctgggaatgctggtggctagcgtgctggcctctgatgagtgggtcacagtgtactacggcgtgccagtgtggcgggaagtgaacaccgtgctgttttgtgccagcgacgccaaggctcactctacagaggcccacaacatctgggccacacacgcctgtgtgcccaccgatcctaatcctcaagaggtggtgctgcacaacgtgaccgaggacttcaacatgtggaacaaccagatggtcgagcagatgcaagaggacatcagcagcctgtgggaccagagcctgaagccttgcgtgaagctgacccctctgtgcgtgaccatgaagtgcagcaatgtgacccggcagaacagcaccagcaactccaacaacaaccccacactgaagaacaacacctccggcaagaacgagacaggcgtgctgcagatgaagaactgcaccttcaacaccaccaccgagctgcgggacaagcggcggaaggtgtacagcctgttctacgtggacgacctgcagtctctcggctctggaacaggcgacacctacaccatgatcaactgcaataccaccgcctgcactcaggcctgtcctaaggtgtccttcgagcccattcctatccactactgtgcccctgccggcttcgccatcctgaagtgcaatgacgtgaacttcagcggcaagggcaagtgcagaaacgtgtccaccgtgcactgtacccacggcatcaagcctgtggtcaccacacagctgatcatcaacggcagcctggccaccgagaacatcaccgtcagagtgaacaacgccagcaagaacacccacgactggatcgtgcagctgagcaccgccgtgaatctgacctgcaagagagtgggcaacaacaccagaggcaaggtgcagatcggccctggcatgaccttctacaacatggaccacatcttcggcgataccagaaaggccttctgcgagctgaatggcaccacctggaacgaaaccctgcagaaagtgcgcgagagcctgatcaaagagatcaaggccaacgccaacggcacctacaacatcacctttgagcctagctctggcggcgaccccgagatcgccaaccacatgtttaattgtggcggcgagttcttctactgcgacacccggaagatgttcaacgagagcgagcccttccacgagaacatgacaatcccttgccggatcagacagatcgtgaacagctggatgcgcgtgggcagatgtatctacgcccctcctattcctggccacatcacctgtaactccctgatcaccggcctgatcctgaccagggaccacgtgaacaacacgaacaataccttcagacccatcggcggcgacatgaagaacatctggcggagcgagctgtacaagtacaaggtcgtgcggatcgagcccctgtctgtggcccctacaaagtgcaagagacacaccgtgggcgagagaagaagaaggcgcagagccgcttttggactgggcgctctgttcctgggatttctgggagccgccggatctacaatgggagctgctgctgtgacactgaccgtgcaggctagacagctgctgagcggaatcgtccagcagcagaacaacctgctgagagcccctgaggctcaacagcatctgctgcagctgactgtgtggggcgtgaaacagctgcaggcaagactgctggccgtggaaagatacctgcaggaccagcagatcctcggcctgtggggatgtagcggcaagagcatctgttgcaccaccgtgccttggaacaagacttggagcggcaagtccatgagcgacatctggaacaatctgacatggcagcagtgggacaagctcatcaccaactacaccggcaccatctttggcctgctggaagaggcccagtctcagcaagagaagaatgagaaggacctgctcgagctggacctgcctagcaccggaggatgatga

SEQ ID NO: 175 - DNA, 1965 bp, synthetic construct
  source 1..1965: mol_type = other DNA
atgcctatgggatctctgcagcctctggccacactgtacctgctgggaatgctggtggctagcgtgctggcctctgatgagtgggtcacagtgtactacggcgtgccagtgtggcgggaagtgaacaccgtgctgttttgtgccagcgacgccaaggctcactctacagaggcccacaacatctgggccacacacgcctgtgtgcccaccgatcctaatcctcaagaggtggtgctgcacaacgtgaccgaggacttcaacatgtggaacaaccagatggtcgagcagatgcaagaggacatcagcagcctgtgggaccagagcctgaagccttgcgtgaagctgacccctctgtgcgtgaccatgaagtgcagcaatgtgacccggcagaacagcaccagcaactccaacaacaaccccacactgaagaacaacacctccggcaagaacgagacaggcgtgctgcagatgaagaactgcaccttcaacaccaccaccgagctgcgggacaagcggcggaaggtgtacagcctgttctacgtggacgacctgcagtctctcggctctggaacaggcgacacctacaccatgatcaactgcaataccaccgcctgcactcaggcctgtcctaaggtgtccttcgagcccattcctatccactactgtgcccctgccggcttcgccatcctgaagtgcaatgacgtgaacttcagcggcaagggcaagtgcagaaacgtgtccaccgtgcactgtacccacggcatcaagcctgtggtcaccacacagctgatcatcaacggcagcctggccaccgagaacatcaccgtcagagtgaacaacgccagcaagaacacccacgactggatcgtgcagctgagcaccgccgtgaatctgacctgcaagagagtgggcaacaacaccagaggcaaggtgcagatcggccctggcatgaccttctacaacatggaccacatcttcggcgataccagaaaggccttctgcgagctgaatggcaccacctggaacgaaaccctgcagaaagtgcgcgagagcctgatcaaagagatcaaggccaacgccaacggcacctacaacatcacctttgagcctagctctggcggcgaccccgagatcgccaaccacatgtttaattgtggcggcgagttcttctactgcgacacccggaagatgttcaacgagagcgagcccttccacgagaacatgacaatcccttgccggatcagacagatcgtgaacagctggatgcgcgtgggcagatgtatctacgcccctcctattcctggccacatcacctgtaactccctgatcaccggcctgatcctgaccagggaccacgtgaacaacacgaacaataccttcagacccatcggcggcgacatgaagaacatctggcggagcgagctgtacaagtacaaggtcgtgcggatcgagcccctgtctgtggcccctacaaagtgcaagagacacaccgtgggcgagagaagaagaaggcgcagagccgcttttggactgggcgctctgttcctgggatttctgggagccgccggatctacaatgggagctgctgctgtgacactgaccgtgcaggctagacagctgctgagcggaaaccctgactggctgcctgatatgactgtgtggggcgtgaaacagctgcaggcaagactgctggccgtggaaagatacctgcaggaccagcagatcctcggcctgtggggatgtagcggcaagagcatctgttgcaccaccgtgccttggaacaagacttggagcggcaagtccatgagcgacatctggaacaatctgacatggcagcagtgggacaagctcatcaccaactacaccggcaccatctttggcctgctggaagaggcccagtctcagcaagagaagaatgagaaggacctgctcgagctggacctgcctagcaccggaggatgatga

SEQ ID NO: 176 - DNA, 2004 bp, synthetic construct
  source 1..2004: mol_type = other DNA
atgcctatgggatctctgcagcctctggccacactgtacctgctgggaatgctggtggctagcgtgctggcctctgatgagtgggtcacagtgtactacggcgtgccagtgtggcgggaagtgtgtaccgtgctgttttgtgccagcgacgccaaggctcactctacaaaggcccggaacatctgggccacatgttgttgtgtgcccaccgatcctaatcctcaagaggtggtgctgcacaacgtgaccgaggacttcaacatgtggaacaaccagatggtcgagcagatgcaagaggacatcagcagcctgtgggaccagagcctgaagccttgcgtgaagctgacccctctgtgcgtgaccatgaagtgcagcaatgtgacccggcagaacagcaccagcaactccaacaacaaccccacactgaagaacaacacctccggcaagaacgagacaggcgtgctgcagatgaagaactgcaccttcaacaccaccaccgagctgcgggacaagcggcggaaggtgtacagcctgttctacgtggacgacctgcagtctctcggctctggaacaggcgacacctacaccatgatcaactgcaataccaccgcctgcactcaggcctgtcctaaggtgtccttcgagcccattcctatccactactgtgcccctgccggcttcgccatcctgaagtgcaatgacgtgaacttcagcggcaagggcaagtgcagaaacgtgtccaccgtgcactgtacccacggcatcaagcctgtggtcaccacacagctgatcatcaacggcagcctggccaccgagaacatcaccgtcagagtgaacaacgccagcaagaacacccacgactggatcgtgcagctgagcaccgccgtgaatctgacctgcaagagagtgggcaacaacaccagaggcaaggtgcagatcggccctggcatgacctggtacaacatggaccacatcttcggcgataccagaaaggccttctgcgagctgaatggcaccacctggaacgaaaccctgcagaaagtgcgcgagagcctgatcaaagagatcaaggccaacgccaacggcacctacaacatcacctttgagcctagctctggcggcgaccccgagatcgccaaccacatgtttaattgtggcggcgagttcttctactgcgacacccggaagatgttcaacgagagcgagcccttccacgagaacatgacaatcccttgccggatcagacagatcgtgaacagctggatgcgcgtgggcagatgtatctacgcccctcctattcctggccacatcacctgtaactccctgatcaccggcctgatcctgaccagggaccacgtgaacaacacgaacaataccttcagacccatcggcggcgacatgaagaacatctggcggagcgagctgtacaagtacaaggtcgtgcggatcgagcccctgtctgtggcccctacaaagtgcaagagacacaccgtgggcgagagaagaagaaggcgcagagccgcttttggactgggcgctctgttcctgggatttctgggagccgccggatctacaatgggagctgctgctatgacactgaccgtgcaggctagacagctgctgagcggaatcgtccagcagcagaacaactgcctgagagcccctgagtgccaacagtgcctgctgcagctgactgtgtggggcgtgaaacagctgcaggcaagactgctggccgtggaaagatacctgcaggaccagcagatcctcggcctgtggggatgtagcggcaagagcatctgttgcaccaccgtgccttggaacaagacttggagcggcaagtccatgagcgacatctggaacaatctgacatggcagcagtgggacaagctcatcaccaactacaccggcaccatctttggcctgctggaagaggcccagtctcagcaagagaagaatgagaaggacctgctcgagctggacctgcctagcaccggaggatgatga

SEQ ID NO: 177 - protein, 669 aa, synthetic construct
MDAMKRGLCCVLLLCGAVFVSPSQEIHARFRRGARAEKLWVTVYYGVPVWREADTTLFCASDAKGYDTEAHNVWATHACVPTDPRPQEMYLENVTENFNMWKNSMVEQMHTDIISLWDESLKPCVKLTPLCVTLDCSTYNNTHNISKEMKNCSFNMTTELRDKRQKVYSFFYKTDIEQINKNGRQYRLINCNTSACTQACPKVSFEPIPIHFCAPAGFAILKCNEKHFNGTGPCKNVSTVQCTHGIKPVVSTQLLLNGSLAEEEVVIRVENTTDNAKTIIVQLNETVKINCTRPNNNTRKSIRIGPGQTFYATGDIIGNIRKAYCNVSKREWNNTLQQVAAQLSKSFNNTKIVFEKHSGGDLEVITHSFVCGGEFFYCNTSGLFNSTWTNSTWTNSTTGSNGTESNDTITLQCEIKQFINMWQRVGRCMYAPPIPGVIRCESNITGLLLTRDGPNSTQNETFRPGGGDMRDNWRSELYKYKVVQIEPLGVAPTHCKRRVVERRRRRRAVGLGAVFFGFLGAAGSTMGAASITLTVQARQLLSGIVQQQSNLLKAPEAQQQLLRLTVWGIKQLQARVLALERYLKDQQLLGIWGCSGKLICCTTVPWNSSWSNKNYTDIWDNMTWLQWDREISNYTDEIYRLIEQSQNQQEKNEQDLLALDGSGLPSTGG

SEQ ID NO: 178 - protein, 658 aa, synthetic construct
MPMGSLQPLATLYLLGMLVASVLAAEKLWVTVYYGVPVWREADTTLFCASDAKGYDTEAHNVWATHACVPTDPRPQEMYLENVTENFNMWKNSMVEQMHTDIISLWDESLKPCVKLTPLCVTLDCSTYNNTHNISKEMKNCSFNMTTELRDKRQKVYSFFYKTDIEQINKNGRQYRLINCNTSACTQACPKVSFEPIPIHFCAPAGFAILKCNEKHFNGTGPCKNVSTVQCTHGIKPVVSTQLLLNGSLAEEEVVIRVENTTDNAKTIIVQLNETVKINCTRPNNNTRKSIRIGPGQTFYATGDIIGNIRKAYCNVSKREWNNTLQQVAAQLSKSFNNTKIVFEKHSGGDLEVITHSFVCGGEFFYCNTSGLFNSTWTNSTWTNSTTGSNGTESNDTITLQCEIKQFINMWQRVGRCMYAPPIPGVIRCESNITGLLLTRDGPNSTQNETFRPGGGDMRDNWRSELYKYKVVQIEPLGVAPTHCKRRVVERRRRRRAVGLGAVFFGFLGAAGSTMGAASITLTVQARQLLSGIVQQQSNLLKAPEAQQQLLRLTVWGIKQLQARVLALERYLKDQQLLGIWGCSGKLICCTTVPWNSSWSNKNYTDIWDNMTWLQWDREISNYTDEIYRLIEQSQNQQEKNEQDLLALDGSGLPSTGG

SEQ ID NO: 179 - protein, 653 aa, synthetic construct
MGWSCIILFLVATATGVHAAEKLWVTVYYGVPVWREADTTLFCASDAKGYDTEAHNVWATHACVPTDPRPQEMYLENVTENFNMWKNSMVEQMHTDIISLWDESLKPCVKLTPLCVTLDCSTYNNTHNISKEMKNCSFNMTTELRDKRQKVYSFFYKTDIEQINKNGRQYRLINCNTSACTQACPKVSFEPIPIHFCAPAGFAILKCNEKHFNGTGPCKNVSTVQCTHGIKPVVSTQLLLNGSLAEEEVVIRVENTTDNAKTIIVQLNETVKINCTRPNNNTRKSIRIGPGQTFYATGDIIGNIRKAYCNVSKREWNNTLQQVAAQLSKSFNNTKIVFEKHSGGDLEVITHSFVCGGEFFYCNTSGLFNSTWTNSTWTNSTTGSNGTESNDTITLQCEIKQFINMWQRVGRCMYAPPIPGVIRCESNITGLLLTRDGPNSTQNETFRPGGGDMRDNWRSELYKYKVVQIEPLGVAPTHCKRRVVERRRRRRAVGLGAVFFGFLGAAGSTMGAASITLTVQARQLLSGIVQQQSNLLKAPEAQQQLLRLTVWGIKQLQARVLALERYLKDQQLLGIWGCSGKLICCTTVPWNSSWSNKNYTDIWDNMTWLQWDREISNYTDEIYRLIEQSQNQQEKNEQDLLALDGSGLPSTGG

SEQ ID NO: 180 - protein, 655 aa, synthetic construct
MPMGSLQPLATLYLLGMLVASVLAAENLWVTVYYGVPVWKEAKTTLFCASDAKAYEKKVHNVWATHACVPTDPNPQEMVLKNVTENFNMWKNDMVDQMHEDVISLWDQSLKPCVKLTPLCVTLDCSTYNNTHNISKGMKNCSFNITTELRDKRRKVNALFYKLDIVQLNKNGRQYRLINCNTSAITQACPKVSFDPIPIHYCAPAGYAILKCNNKTFNGTGPCNNVSTVQCTHGIKPVVSTQLLLNGSLAEGEIIIRSENITNNVKTIIVHLNESVKIECTRPNNKTRKSIRIGPGQWFYATGDVIGDIREAYCNISKSKWNETLQRVSKKLKEYFPHKNITFQPSSGGDLEITTHSFNCGGEFFYCNTSSLFNRTYMANSTDMANSTETNSTRTITIHCRIKQIINMWQEVGRAMYAPPIAGNITCISNITGLLLTRDGGKNNTETFRPGGGNMKDNWRSELYKYKVVKIEPLGVAPTRCKRRVVGRRRRRRAVGIGAVFLGFLGAAGSTMGAASMTLTVQARNLLSGIVQQQSNLLRAPEAQQHLLKLTVWGIKQLQARVLAVERYLRDQQLLGIWGCSGKLICCTNVPWNSSWSNRNLSEIWDNMTWLQWDKEISNYTQIIYGLLEESQNQQEKNEQDLLALDGSGLPSTGG

SEQ ID NO: 181 - protein, 662 aa, synthetic construct
MDAMKRGLCCVLLLCGAVFVSPSQEIHARFRRGARLWVTVYYGVPVWREAKTTLFCASDAKSYEKEVHNVWATHACVPTDPNPQELVLKNVTENFNMWKNDMVDQMHEDIISLWDQSLKPCVKLTPLCVTLHCSTYNNTHNISKEIKNCSFNATTELRDKRKKEYALFYRLDIVPLNKNGRQYRLINCNTSVCTQACPKVTFDPIPIHYCAPAGYAILKCNNKTFNGTGPCNNVSTVQCTHGIKPVVSTQLLLNGSLAEEEIIIRSENLTDNVKTIIVHLNESVEINCTRPNNNTRKSIRIGPGQTFYATGDIIGDIRQAHCNISEIKWNKTLQRVSEKLREHFNKTIIFNQSSGGDLEITTHYFNCGGEFFYCNTSDLFFNKTFNETYSTGSNSTNSNITLPCRIKQIINMWQEVGRCMYASPIAGEITCKSNITGLLLTRDGGGNNSTEETFRPGGGNMRDNWRSELYKYKVVEVKPLGIAPTECRRRVVQRRRRRRAVVGLGAVFLGFLGTAGSTMGAASITLTVQARQLLSGIVQQQSNLLRAPEAQQHMLQLTVWGIKQLQARVLAIERYLKDQQLLGMWGCSGKLICCTNVYWNSSWSNKTYNEIWDNMTWMQWDREIDNYTDTIYKLLEVSQKQQESNEKDLLALDGSGLPSTGG

SEQ ID NO: 182 - protein, 651 aa, synthetic construct
MPMGSLQPLATLYLLGMLVASVLALWVTVYYGVPVWREAKTTLFCASDAKSYEKEVHNVWATHACVPTDPNPQELVLKNVTENFNMWKNDMVDQMHEDIISLWDQSLKPCVKLTPLCVTLHCSTYNNTHNISKEIKNCSFNATTELRDKRKKEYALFYRLDIVPLNKNGRQYRLINCNTSVCTQACPKVTFDPIPIHYCAPAGYAILKCNNKTFNGTGPCNNVSTVQCTHGIKPVVSTQLLLNGSLAEEEIIIRSENLTDNVKTIIVHLNESVEINCTRPNNNTRKSIRIGPGQTFYATGDIIGDIRQAHCNISEIKWNKTLQRVSEKLREHFNKTIIFNQSSGGDLEITTHYFNCGGEFFYCNTSDLFFNKTFNETYSTGSNSTNSNITLPCRIKQIINMWQEVGRCMYASPIAGEITCKSNITGLLLTRDGGGNNSTEETFRPGGGNMRDNWRSELYKYKVVEVKPLGIAPTECRRRVVQRRRRRRAVVGLGAVFLGFLGTAGSTMGAASITLTVQARQLLSGIVQQQSNLLRAPEAQQHMLQLTVWGIKQLQARVLAIERYLKDQQLLGMWGCSGKLICCTNVYWNSSWSNKTYNEIWDNMTWMQWDREIDNYTDTIYKLLEVSQKQQESNEKDLLALDGSGLPSTGG

SEQ ID NO: 183 - protein, 646 aa, synthetic construct
MGWSCIILFLVATATGVHALWVTVYYGVPVWREAKTTLFCASDAKSYEKEVHNVWATHACVPTDPNPQELVLKNVTENFNMWKNDMVDQMHEDIISLWDQSLKPCVKLTPLCVTLHCSTYNNTHNISKEIKNCSFNATTELRDKRKKEYALFYRLDIVPLNKNGRQYRLINCNTSVCTQACPKVTFDPIPIHYCAPAGYAILKCNNKTFNGTGPCNNVSTVQCTHGIKPVVSTQLLLNGSLAEEEIIIRSENLTDNVKTIIVHLNESVEINCTRPNNNTRKSIRIGPGQTFYATGDIIGDIRQAHCNISEIKWNKTLQRVSEKLREHFNKTIIFNQSSGGDLEITTHYFNCGGEFFYCNTSDLFFNKTFNETYSTGSNSTNSNITLPCRIKQIINMWQEVGRCMYASPIAGEITCKSNITGLLLTRDGGGNNSTEETFRPGGGNMRDNWRSELYKYKVVEVKPLGIAPTECRRRVVQRRRRRRAVVGLGAVFLGFLGTAGSTMGAASITLTVQARQLLSGIVQQQSNLLRAPEAQQHMLQLTVWGIKQLQARVLAIERYLKDQQLLGMWGCSGKLICCTNVYWNSSWSNKTYNEIWDNMTWMQWDREIDNYTDTIYKLLEVSQKQQESNEKDLLALDGSGLPSTGG

SEQ ID NO: 184 - protein, 646 aa, synthetic construct
MGWSCIILFLVATATGVHALWVTVYYGVPVWREACTTLFCASDAKSYEKKVRNVWATHCCVPTDPNPQELVLKNVTENFNMWKNDMVDQMHEDIISLWDQSLKPCVKLTPLCVTLHCSTYNNTHNISKEIKNCSFNATTELRDKRKKEYALFYRLDIVPLNKNGRQYRLINCNTSVCTQACPKVTFDPIPIHYCAPAGYAILKCNNKTFNGTGPCNNVSTVQCTHGIKPVVSTQLLLNGSLAEEEIIIRSENLTDNVKTIIVHLNESVEINCTRPNNNTRKSIRIGPGQWFYATGDIIGDIRQAHCNISEIKWNKTLQRVSEKLREHFNKTIIFNQSSGGDLEITTHYFNCGGEFFYCNTSDLFFNKTFNETYSTGSNSTNSNITLPCRIKQIINMWQEVGRCMYASPIAGEITCKSNITGLLLTRDGGGNNSTEETFRPGGGNMRDNWRSELYKYKVVEVKPLGIAPTECRRRVVQRRRRRRAVVGLGAVFLGFLGTAGSTMGAASITLTVQARQLLSGIVQQQSNCLRAPECQQHMLQLTVWGIKQLQARVLAIERYLKDQQLLGMWGCSGKLICCTNVYWNSSWSNKTYNEIWDNMTWMQWDREIDNYTDTIYKLLEVSQKQQESNEKDLLALDGSGLPSTGG

SEQ ID NO: 185 - protein, 651 aa, synthetic construct
MPMGSLQPLATLYLLGMLVASVLALWVTVYYGVPVWREACTTLFCASDAKSYEKKVRNVWATHCCVPTDPNPQELVLKNVTENFNMWKNDMVDQMHEDIISLWDQSLKPCVKLTPLCVTLHCSTYNNTHNISKEIKNCSFNATTELRDKRKKEYALFYRLDIVPLNKNGRQYRLINCNTSVCTQACPKVTFDPIPIHYCAPAGYAILKCNNKTFNGTGPCNNVSTVQCTHGIKPVVSTQLLLNGSLAEEEIIIRSENLTDNVKTIIVHLNESVEINCTRPNNNTRKSIRIGPGQWFYATGDIIGDIRQAHCNISEIKWNKTLQRVSEKLREHFNKTIIFNQSSGGDLEITTHYFNCGGEFFYCNTSDLFFNKTFNETYSTGSNSTNSNITLPCRIKQIINMWQEVGRCMYASPIAGEITCKSNITGLLLTRDGGGNNSTEETFRPGGGNMRDNWRSELYKYKVVEVKPLGIAPTECRRRVVQRRRRRRAVVGLGAVFLGFLGTAGSTMGAASITLTVQARQLLSGIVQQQSNCLRAPECQQHMLQLTVWGIKQLQARVLAIERYLKDQQLLGMWGCSGKLICCTNVYWNSSWSNKTYNEIWDNMTWMQWDREIDNYTDTIYKLLEVSQKQQESNEKDLLALDGSGLPSTGG

SEQ ID NO: 186 - protein, 662 aa, synthetic construct
MDAMKRGLCCVLLLCGAVFVSPSQEIHARFRRGARLWVTVYYGVPVWREACTTLFCASDAKSYEKKVRNVWATHCCVPTDPNPQELVLKNVTENFNMWKNDMVDQMHEDIISLWDQSLKPCVKLTPLCVTLHCSTYNNTHNISKEIKNCSFNATTELRDKRKKEYALFYRLDIVPLNKNGRQYRLINCNTSVCTQACPKVTFDPIPIHYCAPAGYAILKCNNKTFNGTGPCNNVSTVQCTHGIKPVVSTQLLLNGSLAEEEIIIRSENLTDNVKTIIVHLNESVEINCTRPNNNTRKSIRIGPGQWFYATGDIIGDIRQAHCNISEIKWNKTLQRVSEKLREHFNKTIIFNQSSGGDLEITTHYFNCGGEFFYCNTSDLFFNKTFNETYSTGSNSTNSNITLPCRIKQIINMWQEVGRCMYASPIAGEITCKSNITGLLLTRDGGGNNSTEETFRPGGGNMRDNWRSELYKYKVVEVKPLGIAPTECRRRVVQRRRRRRAVVGLGAVFLGFLGTAGSTMGAASITLTVQARQLLSGIVQQQSNCLRAPECQQHMLQLTVWGIKQLQARVLAIERYLKDQQLLGMWGCSGKLICCTNVYWNSSWSNKTYNEIWDNMTWMQWDREIDNYTDTIYKLLEVSQKQQESNEKDLLALDGSGLPSTGG

SEQ ID NO: 187 - protein, 666 aa, synthetic construct
MPMGSLQPLATLYLLGMLVASVLASDEWVTVYYGVPVWREVNTVLFCASDAKAHSTEAHNIWATHACVPTDPNPQEVVLHNVTEDFNMWNNQMVEQMQEDISSLWDQSLKPCVKLTPLCVTMKCSNVTRQNSTSNSNNNPTLKNNTSGKNETGVLQMKNCTFNTTTELRDKRRKVYSLFYVDDLQSLGSGTGDTYTMINCNTTACTQACPKVSFEPIPIHYCAPAGFAILKCNDVNFSGKGKCRNVSTVHCTHGIKPVVTTQLIINGSLATENITVRVNNASKNTHDWIVQLSTAVNLTCKRVGNNTRGKVQIGPGMTFYNMDHIFGDTRKAFCELNGTTWNETLQKVRESLIKEIKANANGTYNITFEPSSGGDPEIANHMFNCGGEFFYCDTRKMFNESEPFHENMTIPCRIRQIVNSWMRVGRCIYAPPIPGHITCNSLITGLILTRDHVNNTNNTFRPIGGDMKNIWRSELYKYKVVRIEPLSVAPTKCKRHTVGERRRRRRAAFGLGALFLGFLGAAGSTMGAAAVTLTVQARQLLSGIVQQQNNLLRAPEAQQHLLQLTVWGVKQLQARLLAVERYLQDQQILGLWGCSGKSICCTTVPWNKTWSGKSMSDIWNNLTWQQWDKLITNYTGTIFGLLEEAQSQQEKNEKDLLELDLPSTGG

SEQ ID NO: 188 - protein, 653 aa, synthetic construct
MPMGSLQPLATLYLLGMLVASVLASDEWVTVYYGVPVWREVNTVLFCASDAKAHSTEAHNIWATHACVPTDPNPQEVVLHNVTEDFNMWNNQMVEQMQEDISSLWDQSLKPCVKLTPLCVTMKCSNVTRQNSTSNSNNNPTLKNNTSGKNETGVLQMKNCTFNTTTELRDKRRKVYSLFYVDDLQSLGSGTGDTYTMINCNTTACTQACPKVSFEPIPIHYCAPAGFAILKCNDVNFSGKGKCRNVSTVHCTHGIKPVVTTQLIINGSLATENITVRVNNASKNTHDWIVQLSTAVNLTCKRVGNNTRGKVQIGPGMTFYNMDHIFGDTRKAFCELNGTTWNETLQKVRESLIKEIKANANGTYNITFEPSSGGDPEIANHMFNCGGEFFYCDTRKMFNESEPFHENMTIPCRIRQIVNSWMRVGRCIYAPPIPGHITCNSLITGLILTRDHVNNTNNTFRPIGGDMKNIWRSELYKYKVVRIEPLSVAPTKCKRHTVGERRRRRRAAFGLGALFLGFLGAAGSTMGAAAVTLTVQARQLLSGNPDWLPDMTVWGVKQLQARLLAVERYLQDQQILGLWGCSGKSICCTTVPWNKTWSGKSMSDIWNNLTWQQWDKLITNYTGTIFGLLEEAQSQQEKNEKDLLELDLPSTGG

SEQ ID NO: 189 - protein, 666 aa, synthetic construct
MPMGSLQPLATLYLLGMLVASVLASDEWVTVYYGVPVWREVCTVLFCASDAKAHSTKARNIWATCCCVPTDPNPQEVVLHNVTEDFNMWNNQMVEQMQEDISSLWDQSLKPCVKLTPLCVTMKCSNVTRQNSTSNSNNNPTLKNNTSGKNETGVLQMKNCTFNTTTELRDKRRKVYSLFYVDDLQSLGSGTGDTYTMINCNTTACTQACPKVSFEPIPIHYCAPAGFAILKCNDVNFSGKGKCRNVSTVHCTHGIKPVVTTQLIINGSLATENITVRVNNASKNTHDWIVQLSTAVNLTCKRVGNNTRGKVQIGPGMTWYNMDHIFGDTRKAFCELNGTTWNETLQKVRESLIKEIKANANGTYNITFEPSSGGDPEIANHMFNCGGEFFYCDTRKMFNESEPFHENMTIPCRIRQIVNSWMRVGRCIYAPPIPGHITCNSLITGLILTRDHVNNTNNTFRPIGGDMKNIWRSELYKYKVVRIEPLSVAPTKCKRHTVGERRRRRRAAFGLGALFLGFLGAAGSTMGAAAMTLTVQARQLLSGIVQQQNNCLRAPECQQCLLQLTVWGVKQLQARLLAVERYLQDQQILGLWGCSGKSICCTTVPWNKTWSGKSMSDIWNNLTWQQWDKLITNYTGTIFGLLEEAQSQQEKNEKDLLELDLPSTGG

SEQ ID NO: 190 - protein, 17 aa, synthetic construct
NCSDAKVNATYKGTREE

SEQ ID NO: 191 - protein, 14 aa, synthetic construct
HCSTYNNTHNISKE

SEQ ID NO: 192 - protein, 9 aa, synthetic construct
SGEGNNNSE

SEQ ID NO: 193 - protein, 13 aa, synthetic construct
FNATTELRNKRQK

SEQ ID NO: 194 - protein, 13 aa, synthetic construct
FNATTELRDKKRR

SEQ ID NO: 195 - protein, 14 aa, synthetic construct
PIDNDTTSYKLTSC

SEQ ID NO: 196 - protein, 20 aa, synthetic construct
EINESNSSNSNTSMYRLINC

SEQ ID NO: 197 - protein, 20 aa, synthetic construct
EINEGNSSNSNTSMYRLINC

SEQ ID NO: 198 - protein, 17 aa, synthetic construct
KINEGNSNTSMYRLINC

SEQ ID NO: 199 - protein, 13 aa, synthetic construct
NEGNSSNSNTSMY

SEQ ID NO: 200 - protein, 10 aa, synthetic construct
SGEGNNNSEY

SEQ ID NO: 201 - protein, 7 aa, synthetic construct
NKNGRQY

SEQ ID NO: 202 - protein, 7 aa, synthetic construct
NEGNSMY

SEQ ID NO: 203 - protein, 40 aa, synthetic construct
KNCSFNATTELRDKRRKEYALFYRLDIVPLNKNGRQYRLI

SEQ ID NO: 204 - protein, 40 aa, synthetic construct
KNCSFNATTELRNKRRKEYALFYRLDIVPLNKNGRQYRLI

SEQ ID NO: 205 - protein, 40 aa, synthetic construct
KNCSFNATTELRDKKRREYALFYRLDIVPLNKNGRQYRLI

SEQ ID NO: 206 - protein, 40 aa, synthetic construct
KNCSFNATTELRDKKRKEYALFYRLDIVPLNKNGRQYRLI

SEQ ID NO: 207 - protein, 856 aa, synthetic construct; identical to SEQ ID NO: 36

SEQ ID NO: 208 - protein, 850 aa, synthetic construct
MTVTGTWRNYQQWWIWGILGFWMLMICNGLWVTVYYGVPVWREAKTTLFCASDAKSYEKEVHNVWATHACVPTDPNPQELVLENVTENFNMWKNDMVDQMHEDIISLWDQSLKPCVKLTPLCVTLNCSDAKVNATYKGTREEIKNCSFNATTELRDKKRREYALFYRLDIVPLSGEGNNNSEYRLINCNTSVITQACPKVTFDPIPIHYCAPAGYAILKCNNKTFNGTGPCNNVSTVQCTHGIKPVVSTQLLLNGSLAEEEIIIRSENLTDNVKTIIVHLNESVEITCTRPNNNTRKSVRIGPGQTFYATGDIIGDIRQAHCNISEIKWEKTLQRVSEKLREHFNKTIIFNQSSGGDLEITTHSFNCGGEFFYCNTSDLFFNKTFNETYSTGSNSTNSTITLPCRIKQIINMWQEVGRAMYASPIAGEITCKSNITGLLLTRDGGGNNSTKETFRPGGGNMRDNWRSELYKYKVVEVKPLGIAPTEARRRVVQKEKRAVVGLGAVFLGFLGAAGSTMGAASITLTVQARQLLSGIVQQQSNLLRAIEAQQHMLQLTVWGIKQLQARVLAIERYLKDQQLLGMWGCSGKLICTTNVYWNSSWSNKTYNEIWDNMTWMQWDREIDNYTDTIYKLLEVSQKQQESNEKDLLALDSWNNLWNWFDISKWLWYIKIFIMIVGGLIGLRIIFAVLSLVNRVRQGYSPLSFQTLTPNPRELDRLGGIEEEGGEQDRGRSVRLVNGFLALVWDDLRSLCLFSYHHLRDFTLIAARAVELLGRSSLQGLQRGWEILKYLGSLVQYWGLELKKSAINLFDTLAIVVAEGTDRIIEFLQRIVRAILHIPRRIRQGFEAALQ

SEQ ID NO: 209 - protein, 844 aa, synthetic construct
MTVTGTWRNYQQWWIWGILGFWMLMICNGLWVTVYYGVPVWREAKTTLFCASDAKSYEKEVHNVWATHACVPTDPNPQELVLENVTENFNMWKNDMVDQMHEDIISLWDQSLKPCVKLTPLCVTLHCSTYNNTHNISKEIKNCSFNATTELRDKKRREYALFYRLDIVPLNKNGRQYRLINCNTSVITQACPKVTFDPIPIHYCAPAGYAILKCNNKTFNGTGPCNNVSTVQCTHGIKPVVSTQLLLNGSLAEEEIIIRSENLTDNVKTIIVHLNESVEINCTRPNNNTRKSVRIGPGQTFYATGDIIGDIRQAHCNISEIKWNKTLQRVSEKLREHFNKTIIFNQSSGGDLEITTHSFNCGGEFFYCNTSDLFFNKTFNETYSTGSNSTNSNITLPCRIKQIINMWQEVGRAMYASPIAGEITCKSNITGLLLTRDGGGNNSTKETFRPGGGNMRDNWRSELYKYKVVEVKPLGIAPTEARRRVVQKEKRAVVGLGAVFLGFLGAAGSTMGAASITLTVQARQLLSGIVQQQSNLLRAIEAQQHMLQLTVWGIKQLQARVLAIERYLKDQQLLGMWGCSGKLICTTNVYWNSSWSNKTYNEIWDNMTWMQWDREIDNYTDTIYKLLEVSQKQQESNEKDLLALDSWNNLWNWFDISKWLWYIKIFIMIVGGLIGLRIIFAVLSLVNRVRQGYSPLSFQTLTPNPRELDRLGGIEEEGGEQDRGRSVRLVNGFLALVWDDLRSLCLFSYHHLRDFTLIAARAVELLGRSSLQGLQRGWEILKYLGSLVQYWGLELKKSAINLFDTLAIVVAEGTDRIIEFLQRIVRAILHIPRRIRQGFEAALQ

SEQ ID NO: 210 - protein, 844 aa, synthetic construct
MTVTGTWRNYQQWWIWGILGFWMLMICNGLWVTVYYGVPVWREAKTTLFCASDAKSYEKEVHNVWATHACVPTDPNPQELVLENVTENFNMWKNDMVDQMHEDIISLWDQSLKPCVKLTPLCVTLHCSTYNNTHNISKEIKNCSFNATTELRDKKRKEYALFYRLDIVPLNKNGRQYRLINCNTSVITQACPKVTFDPIPIHYCAPAGYAILKCNNKTFNGTGPCNNVSTVQCTHGIKPVVSTQLLLNGSLAEEEIIIRSENLTDNVKTIIVHLNESVEINCTRPNNNTRKSVRIGPGQTFYATGDIIGDIRQAHCNISEIKWNKTLQRVSEKLREHFNKTIIFNQSSGGDLEITTHSFNCGGEFFYCNTSDLFFNKTFNETYSTGSNSTNSNITLPCRIKQIINMWQEVGRAMYASPIAGEITCKSNITGLLLTRDGGGNNSTKETFRPGGGNMRDNWRSELYKYKVVEVKPLGIAPTEARRRVVQKEKRAVVGLGAVFLGFLGAAGSTMGAASITLTVQARQLLSGIVQQQSNLLRAIEAQQHMLQLTVWGIKQLQARVLAIERYLKDQQLLGMWGCSGKLICTTNVYWNSSWSNKTYNEIWDNMTWMQWDREIDNYTDTIYKLLEVSQKQQESNEKDLLALDSWNNLWNWFDISKWLWYIKIFIMIVGGLIGLRIIFAVLSLVNRVRQGYSPLSFQTLTPNPRELDRLGGIEEEGGEQDRGRSVRLVNGFLALVWDDLRSLCLFSYHHLRDFTLIAARAVELLGRSSLQGLQRGWEILKYLGSLVQYWGLELKKSAINLFDTLAIVVAEGTDRIIEFLQRIVRAILHIPRRIRQGFEAALQ

SEQ ID NO: 211 - protein, 844 aa, synthetic construct
MTVTGTWRNYQQWWIWGILGFWMLMICNGLWVTVYYGVPVWREAKTTLFCASDAKSYEKEVHNVWATHACVPTDPNPQELVLENVTENFNMWKNDMVDQMHEDIISLWDQSLKPCVKLTPLCVTLHCSTYNNTHNISKEIKNCSFNATTELRNKKRREYALFYRLDIVPLNEGNSMYRLINCNTSVITQACPKVTFDPIPIHYCAPAGYAILKCNNKTFNGTGPCNNVSTVQCTHGIKPVVSTQLLLNGSLAEEEIIIRSENLTDNVKTIIVHLNESVEINCTRPNNNTRKSVRIGPGQTFYATGDIIGDIRQAHCNISEIKWNKTLQRVSEKLREHFNKTIIFNQSSGGDLEITTHSFNCGGEFFYCNTSDLFFNKTFNETYSTGSNSTNSNITLPCRIKQIINMWQEVGRAMYASPIAGEITCKSNITGLLLTRDGGGNNSTKETFRPGGGNMRDNWRSELYKYKVVEVKPLGIAPTEARRRVVQKEKRAVVGLGAVFLGFLGAAGSTMGAASITLTVQARQLLSGIVQQQSNLLRAIEAQQHMLQLTVWGIKQLQARVLAIERYLKDQQLLGMWGCSGKLICTTNVYWNSSWSNKTYNEIWDNMTWMQWDREIDNYTDTIYKLLEVSQKQQESNEKDLLALDSWNNLWNWFDISKWLWYIKIFIMIVGGLIGLRIIFAVLSLVNRVRQGYSPLSFQTLTPNPRELDRLGGIEEEGGEQDRGRSVRLVNGFLALVWDDLRSLCLFSYHHLRDFTLIAARAVELLGRSSLQGLQRGWEILKYLGSLVQYWGLELKKSAINLFDTLAIVVAEGTDRIIEFLQRIVRAILHIPRRIRQGFEAALQ

SEQ ID NO: 212 - protein, 862 aa, synthetic construct
MTVTGTWRNYQQWWIWGILGFWMLMICNGLWVTVYYGVPVWREAKTTLFCASDAKSYEKEVHNVWATHACVPTDPNPQELVLKNVTENFNMWKNDMVDQMHEDIISLWDQSLKPCVKLTPLCVTLHCSTYNNTHNISKEIKNCSFNATTELRNKRRKEYALFYRLDIVPLNKNGRQYRLINCNTSVITQACPKVTFDPIPIHYCAPAGYAILKCNNKTFNGTGPCNNVSTVQCTHGIKPVVSTQLLLNGSLAEEEIIIRSENLTDNVKTIIVHLNESVEINCTRPNNNTRKSIRIGPGQTFYATGDIIGDIRQAHCNISEIKWNKTLQRVSEKLREHFNKTIIFNQSSGGDLEITTHYFNCGGEFFYCNTSDLFFNKTFNETYSTGSNSTNSNITLPCRIKQIINMWQEVGRAMYASPIAGEITCKSNITGLLLTRDGGGNNSTEETFRPGGGNMRDNWRSELYKYKVVEVKPLGIAPTEARRRVVQKEKRAVVGLGAVFLGFLGTAGSTMGAASITLTVQARQLLSGIVQQQSNLLRAIEAQQHMLQLTVWGIKQLQARVLAIERYLKDQQLLGMWGCSGKLICTTNVYWNSSWSNKTYNEIWDNMTWMQWDREIDNYTDTIYKLLEVSQKQQESNEKDLLALDSWNNLWNWFDISKWLWYIKIFIMIVGGLIGLRIIFAVLSLVNRVRQGYSPLSFQTLLPTPRGPARPEGIEEEGGEQGRDRSIRLLTGLSELIWDDLRNLCLFSYHHLRDLILIAARIVQLLGRRGWEALKYLWNILQYWIQELKNSAISLFDTIAIAVAYLQYGWSYFHEAVQAGWRSATETLAGAWGDLWETLRRGGRWILAIPRRIRQGLELTLL

SEQ ID NO: 213 - protein, 864 aa, synthetic construct
MKVMEERKRSFNGFYMTMTICMALLIPCLTSDEWVTVYYGVPVWREVNTVLFCASDAKAHSTEAHNIWATHACVPTDPNPQEVVLHNVTEDFNMWNNQMVEQMQEDISSLWDQSLKPCVKLTPLCVTMKCSNVTRQNSTSNSNNNPTLKNNTSGKNETGVLQMKNCTFNTTTELRDRRRKVYSLFYVDDLQSLGSGTGDTYTMINCNTTAITQACPKVSFEPIPIHYCAPAGFAILKCNDVNFSGKGKCRNVSTVHCTHGIKPVVTTQLIINGSLATENITVRVNNASKNTHDWIVQLSTAVNLTCKRVGNNTRGKVQIGPGMTFYNMDHIFGDTRKAFCELNGTTWNETLQKVRESLIKEIKANANGTYNITFEPSSGGDPEIANHMFNCGGEFFYCDTRKMFNESEPFHENMTIPCRIRQIVNSWMRVGRGIYAPPIPGHITCNSLITGLILTRDHVNNTNNTFRPIGGDMKNIWRSELYKYKVVRIEPLSVAPTKAKRHTVGERRQKRAAFGLGALFLGFLGAAGSTMGAAAVTLTVQARQLLSGIVQQQNNLLRAIEAQQHLLQLTVWGVKQLQARLLAVERYLQDQQILGLWGCSGKSICYTTVPWNKTWSGKSMSDIWNNLTWQQWDKLITNYTGTIFGLLEEAQSQQEKNEKDLLELDQWASLWNWFDITNWLWYIKIFLMAVGGIIGLRIIMSVVSVIRRVRQGYSPLSLQTLIPAQREPGTLGETGGEGGEPGSGRSVRLVTGCWPLIWDDLRNLVIWSYRSLTSLACIVWRQLEKLGQLLINILRLIQEKLTLLRGIIQYWGRELRTSATSLLDATAIAVGEGTDRIIRAVQIVFRIIGNIPRRIRQGLERTLL

SEQ ID NO: 214 - protein, 844 aa, synthetic construct
MTVTGTWRNYQQWWIWGILGFWMLMICNGLWVTVYYGVPVWREAKTTLFCASDAKSYEKEVHNVWATHACVPTDPNPQELVLKNVTENFNMWKNDMVDQMHEDIISLWDQSLKPCVKLTPLCVTLHCSTYNNTHNISKEIKNCSFNATTELRDKRRKEYALFYRLDIVPLNKNGRQYRLINCNTSVITQACPKVTFDPIPIHYCAPAGYAILKCNNKTFNGTGPCNNVSTVQCTHGIKPVVSTQLLLNGSLAEEEIIIRSENLTDNVKTIIVHLNESVEINCTRPNNNTRKSIRIGPGQTFYATGDIIGDIRQAHCNISEIKWNKTLQRVSEKLREHFNKTIIFNQSSGGDLEITTHSFNCGGEFFYCNTSDLFFNKTFNETYSTGSNSTNSNITLPCRIKQIINMWQEVGRAMYASPIAGEITCKSNITGLLLTRDGGGNNSTEETFRPGGGNMRDNWRSELYKYKVVEVKPLGIAPTEARRRVVQKEKRAVVGLGAVFLGFLGTAGSTMGAASITLTVQARQLLSGIVQQQSNLLRAIEAQQHMLQLTVWGIKQLQARVLAIERYLKDQQLLGMWGCSGKLICTTNVYWNSSWSNKTYNEIWDNMTWMQWDREIDNYTDTIYKLLEVSQKQQESNEKDLLALDSWNNLWNWFDISKWLWYIKIFIMIVGGLIGLRIIFAVLSLVNRVRQGYSPLSFQTLTPNPRELDRLGGIEEEGGEQDRDRSIRLVSGFFSLAWNDLRSLCLFCYHRLRDFILIAGRAVELLGRSSLQGLQRGWEILKYLGSLVQYWGLELKKSAINLFDTIAIAVAEGTDRIIEFLQRIVRAILHIPRRIRQGFEAALQ

SEQ ID NO: 215 - protein, 862 aa, synthetic construct
MTVTGTWRNYQQWWIWGILGFWMLMICNGLWVTVYYGVPVWREAKTTLFCASDAKSYEKEVHNVWATHACVPTDPNPQELVLKNVTENFNMWKNDMVDQMHEDIISLWDQSLKPCVKLTPLCVTLHCSTYNNTHNISKEIKNCSFNATTELRDKRRKEYALFYRLDIVPLNKNGRQYRLINCNTSVITQACPKVTFDPIPIHYCAPAGYAILKCNNKTFNGTGPCNNVSTVQCTHGIKPVVSTQLLLNGSLAEEEIIIRSENLTDNVKTIIVHLNESVEINCTRPNNNTRKSIRIGPGQTFYATGDIIGDIRQAHCNISEIKWNKTLQRVSEKLREHFNKTIIFNQSSGGDLEITTHSFNCGGEFFYCNTSDLFFNKTFNETYSTGSNSTNSNITLPCRIKQIINMWQEVGRAMYASPIAGEITCKSNITGLLLTRDGGGNNSTEETFRPGGGNMRDNWRSELYKYKVVEVKPLGIAPTEARRRVVQKEKRAVVGLGAVFLGFLGTAGSTMGAASITLTVQARQLLSGIVQQQSNLLRAIEAQQHMLQLTVWGIKQLQARVLAIERYLKDQQLLGMWGCSGKLICTTNVYWNSSWSNKTYNEIWDNMTWMQWDREIDNYTDTIYKLLEVSQKQQESNEKDLLALDSWNNLWNWFDISKWLWYIKIFIMIVGGLIGLRIIFAVLSLVNRVRQGYSPLSFQTLLPTPRGPARPEGIEEEGGEQGRDRSIRLLTGLSELIWDDLRNLCLFSYHHLRDLILIAARIVQLLGRRGWEALKYLWNILQYWIQELKNSAISLFDTIAIAVAYLQYGWSYFHEAVQAGWRSATETLAGAWGDLWETLRRGGRWILAIPRRIRQGLELTLL

SEQ ID NO: 216 - protein, 862 aa, synthetic construct
MTVTGTWRNYQQWWIWGILGFWMLMICNGLWVTVYYGVPVWREAKTTLFCASDAKSYEKEVHNVWATHACVPTDPNPQELVLKNVTENFNMWKNDMVDQMHEDIISLWDQSLKPCVKLTPLCVTLHCSTYNNTHNISKEIKNCSFNATTELRNKRRKEYALFYRLDIVPLNKNGRQYRLINCNTSVITQACPKVTFDPIPIHYCAPAGYAILKCNNKTFNGTGPCNNVSTVQCTHGIKPVVSTQLLLNGSLAEEEIIIRSENLTDNVKTIIVHLNESVEINCTRPNNNTRKSIRIGPGQTFYATGDIIGDIRQAHCNISEIKWNKTLQRVSEKLREHFNKTIIFNQSSGGDLEITTHSFNCGGEFFYCNTSDLFFNKTFNETYSTGSNSTNSNITLPCRIKQIINMWQEVGRAMYASPIAGEITCKSNITGLLLTRDGGGNNSTEETFRPGGGNMRDNWRSELYKYKVVEVKPLGIAPTEARRRVVQKEKRAVVGLGAVFLGFLGTAGSTMGAASITLTVQARQLLSGIVQQQSNLLRAIEAQQHMLQLTVWGIKQLQARVLAIERYLKDQQLLGMWGCSGKLICTTNVYWNSSWSNKTYNEIWDNMTWMQWDREIDNYTDTIYKLLEVSQKQQESNEKDLLALDSWNNLWNWFDISKWLWYIKIFIMIVGGLIGLRIIFAVLSLVNRVRQGYSPLSFQTLLPTPRGPARPEGIEEEGGEQGRDRSIRLLTGLSELIWDDLRNLCLFSYHHLRDLILIAARIVQLLGRRGWEALKYLWNILQYWIQELKNSAISLFDTIAIAVAYLQYGWSYFHEAVQAGWRSATETLAGAWGDLWETLRRGGRWILAIPRRIRQGLELTLL

SEQ ID NO: 217 - protein, 844 aa, synthetic construct; identical to SEQ ID NO: 210

SEQ ID NO: 218 - protein, 844 aa, synthetic construct
MTVTGTWRNYQQWWIWGILGFWMLMICNGLWVTVYYGVPVWREAKTTLFCASDAKSYEKEVHNVWATHACVPTDPNPQELVLENVTENFNMWKNDMVDQMHEDIISLWDQSLKPCVKLTPLCVTLHCSTYNNTHNISKEIKNCSFNATTELRDKRRKEYALFYRLDIVPLNKNGRQYRLINCNTSVITQACPKVTFDPIPIHYCAPAGYAILKCNNKTFNGTGPCNNVSTVQCTHGIKPVVSTQLLLNGSLAEEEIIIRSENLTDNVKTIIVHLNESVEINCTRPNNNTRKSVRIGPGQTFYATGDIIGDIRQAHCNISEIKWNKTLQRVSEKLREHFNKTIIFNQSSGGDLEITTHSFNCGGEFFYCNTSDLFFNKTFNETYSTGSNSTNSNITLPCRIKQIINMWQEVGRAMYASPIAGEITCKSNITGLLLTRDGGGNNSTKETFRPGGGNMRDNWRSELYKYKVVEVKPLGIAPTEARRRVVQKEKRAVVGLGAVFLGFLGAAGSTMGAASITLTVQARQLLSGIVQQQSNLLRAIEAQQHMLQLTVWGIKQLQARVLAIERYLKDQQLLGMWGCSGKLICTTNVYWNSSWSNKTYNEIWDNMTWMQWDREIDNYTDTIYKLLEVSQKQQESNEKDLLALDSWNNLWNWFDISKWLWYIKIFIMIVGGLIGLRIIFAVLSLVNRVRQGYSPLSFQTLTPNPRELDRLGGIEEEGGEQDRGRSVRLVNGFLALVWDDLRSLCLFSYHHLRDFTLIAARAVELLGRSSLQGLQRGWEILKYLGSLVQYWGLELKKSAINLFDTLAIVVAEGTDRIIEFLQRIVRAILHIPRRIRQGFEAALQ

SEQ ID NO: 219 - protein, 844 aa, synthetic construct
MTVTGTWRNYQQWWIWGILGFWMLMICNGLWVTVYYGVPVWREAKTTLFCASDAKSYEKEVHNVWATHACVPTDPNPQELVLENVTENFNMWKNDMVDQMHEDIISLWDQSLKPCVKLTPLCVTLHCSTYNNTHNISKEIKNCSFNATTELRNKRRKEYALFYRLDIVPLNKNGRQYRLINCNTSVITQACPKVTFDPIPIHYCAPAGYAILKCNNKTFNGTGPCNNVSTVQCTHGIKPVVSTQLLLNGSLAEEEIIIRSENLTDNVKTIIVHLNESVEINCTRPNNNTRKSVRIGPGQTFYATGDIIGDIRQAHCNISEIKWNKTLQRVSEKLREHFNKTIIFNQSSGGDLEITTHSFNCGGEFFYCNTSDLFFNKTFNETYSTGSNSTNSNITLPCRIKQIINMWQEVGRAMYASPIAGEITCKSNITGLLLTRDGGGNNSTKETFRPGGGNMRDNWRSELYKYKVVEVKPLGIAPTEARRRVVQKEKRAVVGLGAVFLGFLGAAGSTMGAASITLTVQARQLLSGIVQQQSNLLRAIEAQQHMLQLTVWGIKQLQARVLAIERYLKDQQLLGMWGCSGKLICTTNVYWNSSWSNKTYNEIWDNMTWMQWDREIDNYTDTIYKLLEVSQKQQESNEKDLLALDSWNNLWNWFDISKWLWYIKIFIMIVGGLIGLRIIFAVLSLVNRVRQGYSPLSFQTLTPNPRELDRLGGIEEEGGEQDRGRSVRLVNGFLALVWDDLRSLCLFSYHHLRDFTLIAARAVELLGRSSLQGLQRGWEILKYLGSLVQYWGLELKKSAINLFDTLAIVVAEGTDRIIEFLQRIVRAILHIPRRIRQGFEAALQ

SEQ ID NO: 220 - protein, 708 aa, synthetic construct
MAISGVPVLGFFIIAVLMSAQESWAGLWVTVYYGVPVWREAKTTLFCASDAKSYEKEVANVWATHACVPTDPNPQELVLKNVTENFNMWKNDMVDQMHEDIISLWDQSLKPCVKLTPLCVTLHCSTYNNTHNISKEIKNCSFNATTELRDKRRKEYALFYRLDIVPLNKNGRQYRLINCNTSVITQACPKVTFDPIPIHYCAPAGYAILKCNNKTFNGTGPCNNVSTVQCTHGIKPVVSTQLLLNGSLAEEEIIIRSENLTDNVKTIIVHLNESVEINCTRPNNNTRKSIRIGPGQTFYATGDIIGDIRQAHCNISEIKWNKTLQRVSEKLREHFNKTIIFNQSSGGDLEITTHSFNCGGEFFYCNTSDLFFNKTFNETYSTGSNSTNSNITLPCRIKQIINMWQEVGRAMYASPIAGEITCKSNITGLLLTRDGGGNNSTEETFRPGGGNMRDNWRSELYKYKVVEVKPLGIAPTEARRRVVQGGGGSGGGGSAVVGLGAVFLGFLGTAGSTMGAASITLTVQARQLLSGIVQQQSNLLRAIEAQQHMLQLTVWGIKQLQARVLTIERYAKDQQLLGMWGCSGKLICTTNVYWNSSWSNKTYNEIWDNMTWMQWDREIDNYTDTIYKLLEVSQKQQESNEKDLLALDSWNNLWNWFDISKWLWYIKIFIMIVGGLIGLRIIFAVLSLVNRVRQGIRPVFSSPPSYFQ

SEQ ID NO: 221 - protein, 708 aa, synthetic construct
MAISGVPVLGFFIIAVLMSAQESWAGLWVTVYYGVPVWREAKTTLFCASDAKSYEKEVANIWATHACVPTDPNPQELVLKNVTENFNMWKNDMVDQMHEDIISLWDQSLKPCVKLTPLCVTLHCSTYNNTHNISKEIKNCSFNATTELRDKRRKEYALFYRLDIVPLNKNGRQYRLINCNTSVITQVCPKLTFDPIPIHYCAPAGYAILKCNNKTFNGTGPCNNVSTVQCTHGIKPVLSTQLLLNGSLAEEEIIIRSENLTDNVKTIIVHLNESVEINCTRPNNNTRKSIRIGPGQTFYATGDIIGDIRQAHCNISEIKWNKTLQRVSEKLREHFNKTIIFNQSSGGDLEITTHSFNCGGEFFYCNTSDLFFNKTFNETYSTGSNSTNSNITLPCRIKQIINMWQEVGRAMYASPIAGEITCKSNITGLLLTRDGGGNNSTEETFRPGGGNMRDNWRSELYKYKVVEVKPLGIAPTEARRRVVQGGGGSGGGGSAVVGLGAVFLGFLGTAGSTMGAASITLTVQARQLLSGIVQQQSNLLRAIEAQQHMLQLTVWGIKQLQARVLTIERYAKDQQLLGMWGCSGKLICTTNVYWNSSWSNKTYNEIWDNMTWMQWDREIDNYTDTIYKLLEVSQKQQESNEKDLLALDSWNNLWNWFDISKWLWYIKIFIMIVGGLIGLRIIFAVLSLVNRVRQGIRPVFSSPPSYFQ

SEQ ID NO: 222 - protein, 840 aa, synthetic construct
MGWSCIILFLVATATGVHALWVTVYYGVPVWREAKTTLFCASDAKSYEKEVHNIWATHACVPTDPNPQELVLKNVTENFNMWKNDMVDQMHEDIISLWDQSLKPCVKLTPLCVTLHCSTYNNTHNISKEIKNCSFNATTELRDKRRKEYALFYRLDIVPLNKNGRQYRLINCNTSVITQVCPKLTFDPIPIHYCAPAGYAILKCNNKTFNGTGPCNNVSTVQCTHGIKPVLSTQLLLNGSLAEEEIIIRSENLTDNVKTIIVHLNESVEINCTRPNNNTRKSIRIGPGQTFYATGDIIGDIRQAHCNISEIKWNKTLQRVSEKLREHFNKTIIFNQSSGGDLEITTHSFNCGGEFFYCNTSDLFFNKTFNETYSTGSNSTNSNITLPCRIKQIINMWQEVGRAMYASPIAGEITCKSNITGLLLTRDGGGNNSTEETFRPGGGNMRDNWRSELYKYKVVEVKPLGIAPTECRRRVVQGGGGSGGGGSAVVGLGAVFLGFLGTAGSTMGAASMTLTVQARQLLGSAGSAGSGSAGSGSAGSGSAGSTVWGIKQLQARVLAIERYLKDQQLLGMWGCSGKLICCTNVYWNSSWSNKTYNEIWDNMTWMQWDREIDNYTDTIYKLLEVSQKQQESNEKDLLALDSWNNLWNWFDISKWLWYIKIFIMIVGGLIGLRIIFAVLSLVNRVRQGISPLSFQTLTPNPRELDRLGGIEEEGGEQDRDRSIRLVSGFFSLAWNDLRSLCLFCYHRLRDFILIAGRAVELLGRSSLQGLQRGWEILKYLGSLVQYWGLELKKSAINLFDTIAIAVAEGTDRIIEFLQRIVRAILHIPRRIRQGFEAALQ

SEQ ID NO: 223 - protein, 840 aa, synthetic construct
MGWSCIILFLVATATGVHALWVTVYYGVPVWREAKTTLFCASDAKSYEKEVHNIWATHACVPTDPNPQELVLKNVTENFNMWKNDMVDQMHEDIISLWDQSLKPCVKLTPLCVTLHCSTYNNTHNISKEIKNCSFNATTELRDKRRKEYALFYRLDIVPLNKNGRQYRLINCNTSVCTQVCPKLTFDPIPIHYCAPAGYAILKCNNKTFNGTGPCNNVSTVQCTHGIKPVLSTQLLLNGSLAEEEIIIRSENLTDNVKTIIVHLNESVEINCTRPNNNTRKSIRIGPGQTFYATGDIIGDIRQAHCNISEIKWNKTLQRVSEKLREHFNKTIIFNQSSGGDLEITTHSFNCGGEFFYCNTSDLFFNKTFNETYSTGSNSTNSNITLPCRIKQIINMWQEVGRCMYASPIAGEITCKSNITGLLLTRDGGGNNSTEETFRPGGGNMRDNWRSELYKYKVVEVKPLGIAPTECRRRVVQGGGGSGGGGSAVVGLGAVFLGFLGTAGSTMGAASMTLTVQARQLLGSAGSAGSGSAGSGSAGSGSAGSTVWGIKQLQARVLAIERYLKDQQLLGMWGCSGKLICCTNVYWNSSWSNKTYNEIWDNMTWMQWDREIDNYTDTIYKLLEVSQKQQESNEKDLLALDSWNNLWNWFDISKWLWYIKIFIMIVGGLIGLRIIFAVLSLVNRVRQGISPLSFQTLTPNPRELDRLGGIEEEGGEQDRDRSIRLVSGFFSLAWNDLRSLCLFCYHRLRDFILIAGRAVELLGRSSLQGLQRGWEILKYLGSLVQYWGLELKKSAINLFDTIAIAVAEGTDRIIEFLQRIVRAILHIPRRIRQGFEAAAA

SEQ ID NO: 224 - protein, 840 aa, synthetic construct
MGWSCIILFLVATATGVHALWVTVYYGVPVWREAKTTLFCASDAKSYEKEVHNIWATHACVPTDPNPQELVLKNVTENFNMWKNDMVDQMHEDIISLWDQSLKPCVKLTPLCVTLHCSTYNNTHNISKEIKNCSFNATTELRDKRRKEYALFYRLDIVPLNKNGRQYRLINCNTSVCTQVCPKLTFDPIPIHYCAPAGYAILKCNNKTFNGTGPCNNVSTVQCTHGIKPVLSTQLLLNGSLAEEEIIIRSENLTDNVKTIIVHLNESVEINCTRPNNNMRKSIRIGPGQTFYALGDIIGDIRQPHCNISEIKWNKTLQRVSEKLREHFNKTIIFNQSSGGDLEITTHSFNCGGEFFYCNTSDLFFNKTFNETYSTGSNSTNSNITLPCRIKQIINMWQEVGRCMYAPPIAGNITCKSNITGLLLTRDGGGNNSTEETFRPGGGNMRDNWRSELYKYKVVEVKPLGIAPTECRRRVVQGGGGSGGGGSAVVGLGAVFLGFLGTAGSTMGAASMTLTVQARQLLGSAGSAGSGSAGSGSAGSGSAGSTVWGFKQLQARVLAIERYLEVQQLLGMWGCSGKLICCTNVPWNSSWSNKTYNEIWDNMTWMQWDREIGNYTDTIYKLLEVSQFQQEINEKDLLALDSWNNLWNWFDISKWLWYIKIFIMIVGGLIGLRIIFAVLSLVNRVRQGISPLSFQTLTPNPRELDRLGGIEEEGGEQDRDRSIRLVSGFFSLAWNDLRSLCLFCYHRLRDFILIAGRAVELLGRSSLQGLQRGWEILKYLGSLVQYWGLELKKSAINLFDTIAIAVAEGTDRIIEFLQRIVRAILHIPRRIRQGFEAAAA

SEQ ID NO: 225 - protein, 840 aa, synthetic construct
MGWSCIILFLVATATGVHALWVTVYYGVPVWREAKTTLFCASDAKSYEKEVANIWATHACVPTDPNPQELVLKNVTENFNMWKNDMVDQMHEDIISLWDQSLKPCVKLTPLCVTLHCSTYNNTHNISKEIKNCSFNATTELRDKRRKEYALFYRLDIVPLNKNGRQYRLINCNTSVCTQVCPKLTFDPIPIHYCAPAGYAILKCNNKTFNGTGPCNNVSTVQCTHGIKPVLSTQLLLNGSLAEEEIIIRSENLTDNVKTIIVHLNESVEINCTRPNNNTRKSIRIGPGQWFYATGDIIGDIRQAHCNISEIKWNKTLQRVSEKLREHFNKTIIFNQSSGGDLEITTHSFNCGGEFFYCNTSDLFFNKTFNETYSTGSNSTNSNITLPCRIKQIINMWQEVGRCMYASPIAGEITCKSNITGLLLTRDGGGNNSTEETFRPGGGNMRDNWRSELYKYKVVEVKPLGIAPTECRRRVVQGGGGSGGGGSAVVGLGAVFLGFLGTAGSTMGAASMTLTVQARQLLGSAGSAGSGSAGSGSAGSGSAGSTVWGIKQLQARVLAIERYLKDQQLLGMWGCSGKLICCTNVYWNSSWSNKTYNEIWDNMTWMQWDREIDNYTDTIYKLLEVSQKQQEKNEQDLLALDSWNNLWNWFDISKWLWYIKIFIMIVGGLIGLRIIFAVLSLVNRVRQGISPLSFQTLTPNPRELDRLGGIEEEGGEQDRDRSIRLVSGFFSLAWNDLRSLCLFCYHRLRDFILIAGRAVELLGRSSLQGLQRGWEILKYLGSLVQYWGLELKKSAINLFDTIAIAVAEGTDRIIEFLQRIVRAILHIPRRIRQGFEAAAA

SEQ ID NO: 226 - protein, 840 aa, synthetic construct
MGWSCIILFLVATATGVHALWVTVYYGVPVWREAKTTLFCASDAKSYEKEVANIWATHACVPTDPNPQELVLKNVTENFNMWKNDMVDQMHEDIISLWDQSLKPCVKLTPLCVTLHCSTYNNTHNISKEIKNCSFNATTELRDKRRKEYALFYRLDIVPLNKNGRQYRLINCNTSVCTQVCPKLTFDPIPIHYCAPAGYAILKCNNKTFNGTGPCNNVSTVQCTHGIKPVLSTQLLLNGSLAEEEIIIRSENLTDNVKTIIVHLNESVEINCTRPNNMTRKSIRIGPGQWFYALGDIIGDIRQPHCNISEIKWNKTLQRVSEKLREHFNKTIIFNQSSGGDLEITTHSFNCGGEFFYCNTSDLFFNKTFNETYSTGSNSTNSNITLPCRIKQIINMWQEVGRCMYAPPIAGNITCKSNITGLLLTRDGGGNNSTEETFRPGGGNMRDNWRSELYKYKVVEVKPLGIAPTECRRRVVQGGGGSGGGGSAVVGLGAVFLGFLGTAGSTMGAASMTLTVQARQLLGSAGSAGSGSAGSGSAGSGSAGSTVWGFKQLQARVLAIERYLEVQQLLGMWGCSGKLICCTNVPWNSSWSNKTYNEIWDNMTWMQWDREIGNYTDTIYKLLEVSQFQQEKNEQDLLALDSWNNLWNWFDISKWLWYIKIFIMIVGGLIGLRIIFAVLSLVNRVRQGISPLSFQTLTPNPRELDRLGGIEEEGGEQDRDRSIRLVSGFFSLAWNDLRSLCLFCYHRLRDFILIAGRAVELLGRSSLQGLQRGWEILKYLGSLVQYWGLELKKSAINLFDTIAIAVAEGTDRIIEFLQRIVRAILHIPRRIRQGFEAAAA

SEQ ID NO: 227 - protein, 689 aa, synthetic construct
MGWSCIILFLVATATGVHALWVTVYYGVPVWREAKTTLFCASDAKSYEKEVHNIWATHACVPTDPNPQELVLKNVTENFNMWKNDMVDQMHEDIISLWDQSLKPCVKLTPLCVTLHCSTYNNTHNISKEIKNCSFNATTELRDKRRKEYALFYRLDIVPLNKNGRQYRLINCNTSVITQVCPKLTFDPIPIHYCAPAGYAILKCNNKTFNGTGPCNNVSTVQCTHGIKPVLSTQLLLNGSLAEEEIIIRSENLTDNVKTIIVHLNESVEINCTRPNNNTRKSIRIGPGQTFYATGDIIGDIRQAHCNISEIKWNKTLQRVSEKLREHFNKTIIFNQSSGGDLEITTHSFNCGGEFFYCNTSDLFFNKTFNETYSTGSNSTNSNITLPCRIKQIINMWQEVGRAMYASPIAGEITCKSNITGLLLTRDGGGNNSTEETFRPGGGNMRDNWRSELYKYKVVEVKPLGIAPTECRRRVVQGGGGSGGGGSAVVGLGAVFLGFLGTAGSTMGAASMTLTVQARQLLGSAGSAGSGSAGSGSAGSGSAGSTVWGIKQLQARVLAIERYLKDQQLLGMWGCSGKLICCTNVYWNSSWSNKTYNEIWDNMTWMQWDREIDNYTDTIYKLLEVSQKQQESNEKDLLALDSWNNLWNWFDISKWLWYIKIFIMIVGGLIGLRIIFAVLSLVNRVRQGI

SEQ ID NO: 228 - protein, 689 aa, synthetic construct
MGWSCIILFLVATATGVHALWVTVYYGVPVWREAKTTLFCASDAKSYEKEVHNIWATHACVPTDPNPQELVLKNVTENFNMWKNDMVDQMHEDIISLWDQSLKPCVKLTPLCVTLHCSTYNNTHNISKEIKNCSFNATTELRDKRRKEYALFYRLDIVPLNKNGRQYRLINCNTSVCTQVCPKLTFDPIPIHYCAPAGYAILKCNNKTFNGTGPCNNVSTVQCTHGIKPVLSTQLLLNGSLAEEEIIIRSENLTDNVKTIIVHLNESVEINCTRPNNNTRKSIRIGPGQTFYATGDIIGDIRQAHCNISEIKWNKTLQRVSEKLREHFNKTIIFNQSSGGDLEITTHSFNCGGEFFYCNTSDLFFNKTFNETYSTGSNSTNSNITLPCRIKQIINMWQEVGRCMYASPIAGEITCKSNITGLLLTRDGGGNNSTEETFRPGGGNMRDNWRSELYKYKVVEVKPLGIAPTECRRRVVQGGGGSGGGGSAVVGLGAVFLGFLGTAGSTMGAASMTLTVQARQLLGSAGSAGSGSAGSGSAGSGSAGSTVWGIKQLQARVLAIERYLKDQQLLGMWGCSGKLICCTNVYWNSSWSNKTYNEIWDNMTWMQWDREIDNYTDTIYKLLEVSQKQQESNEKDLLALDSWNNLWNWFDISKWLWYIKIFIMIVGGLIGLRIIFAVLSLVNRVRQGI

SEQ ID NO: 229 - protein, 689 aa, synthetic construct
MGWSCIILFLVATATGVHALWVTVYYGVPVWREAKTTLFCASDAKSYEKEVHNIWATHACVPTDPNPQELVLKNVTENFNMWKNDMVDQMHEDIISLWDQSLKPCVKLTPLCVTLHCSTYNNTHNISKEIKNCSFNATTELRDKRRKEYALFYRLDIVPLNKNGRQYRLINCNTSVCTQVCPKLTFDPIPIHYCAPAGYAILKCNNKTFNGTGPCNNVSTVQCTHGIKPVLSTQLLLNGSLAEEEIIIRSENLTDNVKTIIVHLNESVEINCTRPNNNMRKSIRIGPGQTFYALGDIIGDIRQPHCNISEIKWNKTLQRVSEKLREHFNKTIIFNQSSGGDLEITTHSFNCGGEFFYCNTSDLFFNKTFNETYSTGSNSTNSNITLPCRIKQIINMWQEVGRCMYAPPIAGNITCKSNITGLLLTRDGGGNNSTEETFRPGGGNMRDNWRSELYKYKVVEVKPLGIAPTECRRRVVQGGGGSGGGGSAVVGLGAVFLGFLGTAGSTMGAASMTLTVQARQLLGSAGSAGSGSAGSGSAGSGSAGSTVWGFKQLQARVLAIERYLEVQQLLGMWGCSGKLICCTNVPWNSSWSNKTYNEIWDNMTWMQWDREIGNYTDTIYKLLEVSQFQQEINEKDLLALDSWNNLWNWFDISKWLWYIKIFIMIVGGLIGLRIIFAVLSLVNRVRQGI

SEQ ID NO: 230 - protein, 689 aa, synthetic construct
MGWSCIILFLVATATGVHALWVTVYYGVPVWREAKTTLFCASDAKSYEKEVANIWATHACVPTDPNPQELVLKNVTENFNMWKNDMVDQMHEDIISLWDQSLKPCVKLTPLCVTLHCSTYNNTHNISKEIKNCSFNATTELRDKRRKEYALFYRLDIVPLNKNGRQYRLINCNTSVCTQVCPKLTFDPIPIHYCAPAGYAILKCNNKTFNGTGPCNNVSTVQCTHGIKPVLSTQLLLNGSLAEEEIIIRSENLTDNVKTIIVHLNESVEINCTRPNNNTRKSIRIGPGQWFYATGDIIGDIRQAHCNISEIKWNKTLQRVSEKLREHFNKTIIFNQSSGGDLEITTHSFNCGGEFFYCNTSDLFFNKTFNETYSTGSNSTNSNITLPCRIKQIINMWQEVGRCMYASPIAGEITCKSNITGLLLTRDGGGNNSTEETFRPGGGNMRDNWRSELYKYKVVEVKPLGIAPTECRRRVVQGGGGSGGGGSAVVGLGAVFLGFLGTAGSTMGAASMTLTVQARQLLGSAGSAGSGSAGSGSAGSGSAGSTVWGIKQLQARVLAIERYLKDQQLLGMWGCSGKLICCTNVYWNSSWSNKTYNEIWDNMTWMQWDREIDNYTDTIYKLLEVSQKQQEKNEQDLLALDSWNNLWNWFDISKWLWYIKIFIMIVGGLIGLRIIFAVLSLVNRVRQGI

SEQ ID NO: 231 - protein, 689 aa, synthetic construct
MGWSCIILFLVATATGVHALWVTVYYGVPVWREAKTTLFCASDAKSYEKEVANIWATHACVPTDPNPQELVLKNVTENFNMWKNDMVDQMHEDIISLWDQSLKPCVKLTPLCVTLHCSTYNNTHNISKEIKNCSFNATTELRDKRRKEYALFYRLDIVPLNKNGRQYRLINCNTSVCTQVCPKLTFDPIPIHYCAPAGYAILKCNNKTFNGTGPCNNVSTVQCTHGIKPVLSTQLLLNGSLAEEEIIIRSENLTDNVKTIIVHLNESVEINCTRPNNMTRKSIRIGPGQWFYALGDIIGDIRQPHCNISEIKWNKTLQRVSEKLREHFNKTIIFNQSSGGDLEITTHSFNCGGEFFYCNTSDLFFNKTFNETYSTGSNSTNSNITLPCRIKQIINMWQEVGRCMYAPPIAGNITCKSNITGLLLTRDGGGNNSTEETFRPGGGNMRDNWRSELYKYKVVEVKPLGIAPTECRRRVVQGGGGSGGGGSAVVGLGAVFLGFLGTAGSTMGAASMTLTVQARQLLGSAGSAGSGSAGSGSAGSGSAGSTVWGFKQLQARVLAIERYLEVQQLLGMWGCSGKLICCTNVPWNSSWSNKTYNEIWDNMTWMQWDREIGNYTDTIYKLLEVSQFQQEKNEQDLLALDSWNNLWNWFDISKWLWYIKIFIMIVGGLIGLRIIFAVLSLVNRVRQGI

SEQ ID NO: 232 - protein, 732 aa, synthetic construct
MGWSCIILFLVATATGVHALWVTVYYGVPVWREAKTTLFCASDAKSYEKEVHNIWATHACVPTDPNPQELVLKNVTENFNMWKNDMVDQMHEDIISLWDQSLKPCVKLTPLCVTLHCSTYNNTHNISKEIKNCSFNATTELRDKRRKEYALFYRLDIVPLNKNGRQYRLINCNTSVITQVCPKLTFDPIPIHYCAPAGYAILKCNNKTFNGTGPCNNVSTVQCTHGIKPVLSTQLLLNGSLAEEEIIIRSENLTDNVKTIIVHLNESVEINCTRPNNNTRKSIRIGPGQTFYATGDIIGDIRQAHCNISEIKWNKTLQRVSEKLREHFNKTIIFNQSSGGDLEITTHSFNCGGEFFYCNTSDLFFNKTFNETYSTGSNSTNSNITLPCRIKQIINMWQEVGRAMYASPIAGEITCKSNITGLLLTRDGGGNNSTEETFRPGGGNMRDNWRSELYKYKVVEVKPLGIAPTECRRRVVQGGGGSGGGGSAVVGLGAVFLGFLGTAGSTMGAASMTLTVQARQLLGSAGSAGSGSAGSGSAGSGSAGSTVWGIKQLQARVLAIERYLKDQQLLGMWGCSGKLICCTNVYWNSSWSNKTYNEIWDNMTWMQWDREIDNYTDTIYKLLEVSQKQQESNEKDLLALDSWNNLWNWFDISKWLWYIKIFIMIVGGLIGLRIIFAVLSLVNRVRQGISPLSFQTLTPNPRELDRLGGIEEEGGEQDRDRSIRLVSGFFSL

SEQ ID NO: 233 - protein, 732 aa, synthetic construct
MGWSCIILFLVATATGVHALWVTVYYGVPVWREAKTTLFCASDAKSYEKEVHNIWATHACVPTDPNPQELVLKNVTENFNMWKNDMVDQMHEDIISLWDQSLKPCVKLTPLCVTLHCSTYNNTHNISKEIKNCSFNATTELRDKRRKEYALFYRLDIVPLNKNGRQYRLINCNTSVCTQVCPKLTFDPIPIHYCAPAGYAILKCNNKTFNGTGPCNNVSTVQCTHGIKPVLSTQLLLNGSLAEEEIIIRSENLTDNVKTIIVHLNESVEINCTRPNNNTRKSIRIGPGQTFYATGDIIGDIRQAHCNISEIKWNKTLQRVSEKLREHFNKTIIFNQSSGGDLEITTHSFNCGGEFFYCNTSDLFFNKTFNETYSTGSNSTNSNITLPCRIKQIINMWQEVGRCMYASPIAGEITCKSNITGLLLTRDGGGNNSTEETFRPGGGNMRDNWRSELYKYKVVEVKPLGIAPTECRRRVVQGGGGSGGGGSAVVGLGAVFLGFLGTAGSTMGAASMTLTVQARQLLGSAGSAGSGSAGSGSAGSGSAGSTVWGIKQLQARVLAIERYLKDQQLLGMWGCSGKLICCTNVYWNSSWSNKTYNEIWDNMTWMQWDREIDNYTDTIYKLLEVSQKQQESNEKDLLALDSWNNLWNWFDISKWLWYIKIFIMIVGGLIGLRIIFAVLSLVNRVRQGISPLSFQTLTPNPRELDRLGGIEEEGGEQDRDRSIRLVSGFFSL

SEQ ID NO: 234 - protein, 732 aa, synthetic construct
MGWSCIILFLVATATGVHALWVTVYYGVPVWREAKTTLFCASDAKSYEKEVHNIWATHACVPTDPNPQELVLKNVTENFNMWKNDMVDQMHEDIISLWDQSLKPCVKLTPLCVTLHCSTYNNTHNISKEIKNCSFNATTELRDKRRKEYALFYRLDIVPLNKNGRQYRLINCNTSVCTQVCPKLTFDPIPIHYCAPAGYAILKCNNKTFNGTGPCNNVSTVQCTHGIKPVLSTQLLLNGSLAEEEIIIRSENLTDNVKTIIVHLNESVEINCTRPNNNMRKSIRIGPGQTFYALGDIIGDIRQPHCNISEIKWNKTLQRVSEKLREHFNKTIIFNQSSGGDLEITTHSFNCGGEFFYCNTSDLFFNKTFNETYSTGSNSTNSNITLPCRIKQIINMWQEVGRCMYAPPIAGNITCKSNITGLLLTRDGGGNNSTEETFRPGGGNMRDNWRSELYKYKVVEVKPLGIAPTECRRRVVQGGGGSGGGGSAVVGLGAVFLGFLGTAGSTMGAASMTLTVQARQLLGSAGSAGSGSAGSGSAGSGSAGSTVWGFKQLQARVLAIERYLEVQQLLGMWGCSGKLICCTNVPWNSSWSNKTYNEIWDNMTWMQWDREIGNYTDTIYKLLEVSQFQQEINEKDLLALDSWNNLWNWFDISKWLWYIKIFIMIVGGLIGLRIIFAVLSLVNRVRQGISPLSFQTLTPNPRELDRLGGIEEEGGEQDRDRSIRLVSGFFSL

SEQ ID NO: 235 - protein, 732 aa, synthetic construct
MGWSCIILFLVATATGVHALWVTVYYGVPVWREAKTTLFCASDAKSYEKEVANIWATHACVPTDPNPQELVLKNVTENFNMWKNDMVDQMHEDIISLWDQSLKPCVKLTPLCVTLHCSTYNNTHNISKEIKNCSFNATTELRDKRRKEYALFYRLDIVPLNKNGRQYRLINCNTSVCTQVCPKLTFDPIPIHYCAPAGYAILKCNNKTFNGTGPCNNVSTVQCTHGIKPVLSTQLLLNGSLAEEEIIIRSENLTDNVKTIIVHLNESVEINCTRPNNNTRKSIRIGPGQWFYATGDIIGDIRQAHCNISEIKWNKTLQRVSEKLREHFNKTIIFNQSSGGDLEITTHSFNCGGEFFYCNTSDLFFNKTFNETYSTGSNSTNSNITLPCRIKQIINMWQEVGRCMYASPIAGEITCKSNITGLLLTRDGGGNNSTEETFRPGGGNMRDNWRSELYKYKVVEVKPLGIAPTECRRRVVQGGGGSGGGGSAVVGLGAVFLGFLGTAGSTMGAASMTLTVQARQLLGSAGSAGSGSAGSGSAGSGSAGSTVWGIKQLQARVLAIERYLKDQQLLGMWGCSGKLICCTNVYWNSSWSNKTYNEIWDNMTWMQWDREIDNYTDTIYKLLEVSQKQQEKNEQDLLALDSWNNLWNWFDISKWLWYIKIFIMIVGGLIGLRIIFAVLSLVNRVRQGISPLSFQTLTPNPRELDRLGGIEEEGGEQDRDRSIRLVSGFFSL

SEQ ID NO: 236 - protein, 732 aa, synthetic construct
MGWSCIILFLVATATGVHALWVTVYYGVPVWREAKTTLFCASDAKSYEKEVANIWATHACVPTDPNPQELVLKNVTENFNMWKNDMVDQMHEDIISLWDQSLKPCVKLTPLCVTLHCSTYNNTHNISKEIKNCSFNATTELRDKRRKEYALFYRLDIVPLNKNGRQYRLINCNTSVCTQVCPKLTFDPIPIHYCAPAGYAILKCNNKTFNGTGPCNNVSTVQCTHGIKPVLSTQLLLNGSLAEEEIIIRSENLTDNVKTIIVHLNESVEINCTRPNNMTRKSIRIGPGQWFYALGDIIGDIRQPHCNISEIKWNKTLQRVSEKLREHFNKTIIFNQSSGGDLEITTHSFNCGGEFFYCNTSDLFFNKTFNETYSTGSNSTNSNITLPCRIKQIINMWQEVGRCMYAPPIAGNITCKSNITGLLLTRDGGGNNSTEETFRPGGGNMRDNWRSELYKYKVVEVKPLGIAPTECRRRVVQGGGGSGGGGSAVVGLGAVFLGFLGTAGSTMGAASMTLTVQARQLLGSAGSAGSGSAGSGSAGSGSAGSTVWGFKQLQARVLAIERYLEVQQLLGMWGCSGKLICCTNVPWNSSWSNKTYNEIWDNMTWMQWDREIGNYTDTIYKLLEVSQFQQEKNEQDLLALDSWNNLWNWFDISKWLWYIKIFIMIVGGLIGLRIIFAVLSLVNRVRQGISPLSFQTLTPNPRELDRLGGIEEEGGEQDRDRSIRLVSGFFSL

SEQ ID NO: 237 - protein, 727 aa, synthetic construct
MGWSCIILFLVATATGVHALWVTVYYGVPVWREAKTTLFCASDAKSYEKEVHNIWATHACVPTDPNPQELVLKNVTENFNMWKNDMVDQMHEDIISLWDQSLKPCVKLTPLCVTLHCSTYNNTHNISKEIKNCSFNATTELRDKRRKEYALFYRLDIVPLNKNGRQYRLINCNTSVITQVCPKLTFDPIPIHYCAPAGYAILKCNNKTFNGTGPCNNVSTVQCTHGIKPVLSTQLLLNGSLAEEEIIIRSENLTDNVKTIIVHLNESVEINCTRPNNNTRKSIRIGPGQTFYATGDIIGDIRQAHCNISEIKWNKTLQRVSEKLREHFNKTIIFNQSSGGDLEITTHSFNCGGEFFYCNTSDLFFNKTFNETYSTGSNSTNSNITLPCRIKQIINMWQEVGRAMYASPIAGEITCKSNITGLLLTRDGGGNNSTEETFRPGGGNMRDNWRSELYKYKVVEVKPLGIAPTECRRRVVQGGGGSGGGGSAVVGLGAVFLGFLGTAGSTMGAASMTLTVQARQLLGSAGSAGSGSAGSGSAGSGSAGSTVWGIKQLQARVLAIERYLKDQQLLGMWGCSGKLICCTNVYWNSSWSNKTYNEIWDNMTWMQWDREIDNYTDTIYKLLEVSQKQQESNEKDLLALDSWNNLWNWFDISKWLWYIKIFIMIVGGLIGLRIIFAVLSLVNRVRQGISPLSFQTLTPNPRELDRLGGIEEEGGEQDRDRSIRLVS

SEQ ID NO: 238 - protein, 727 aa, synthetic construct
MGWSCIILFLVATATGVHALWVTVYYGVPVWREAKTTLFCASDAKSYEKEVHNIWATHACVPTDPNPQELVLKNVTENFNMWKNDMVDQMHEDIISLWDQSLKPCVKLTPLCVTLHCSTYNNTHNISKEIKNCSFNATTELRDKRRKEYALFYRLDIVPLNKNGRQYRLINCNTSVCTQVCPKLTFDPIPIHYCAPAGYAILKCNNKTFNGTGPCNNVSTVQCTHGIKPVLSTQLLLNGSLAEEEIIIRSENLTDNVKTIIVHLNESVEINCTRPNNNTRKSIRIGPGQTFYATGDIIGDIRQAHCNISEIKWNKTLQRVSEKLREHFNKTIIFNQSSGGDLEITTHSFNCGGEFFYCNTSDLFFNKTFNETYSTGSNSTNSNITLPCRIKQIINMWQEVGRCMYASPIAGEITCKSNITGLLLTRDGGGNNSTEETFRPGGGNMRDNWRSELYKYKVVEVKPLGIAPTECRRRVVQGGGGSGGGGSAVVGLGAVFLGFLGTAGSTMGAASMTLTVQARQLLGSAGSAGSGSAGSGSAGSGSAGSTVWGIKQLQARVLAIERYLKDQQLLGMWGCSGKLICCTNVYWNSSWSNKTYNEIWDNMTWMQWDREIDNYTDTIYKLLEVSQKQQESNEKDLLALDSWNNLWNWFDISKWLWYIKIFIMIVGGLIGLRIIFAVLSLVNRVRQGISPLSFQTLTPNPRELDRLGGIEEEGGEQDRDRSIRLVS

SEQ ID NO: 239 - protein, 727 aa, synthetic construct
MGWSCIILFLVATATGVHALWVTVYYGVPVWREAKTTLFCASDAKSYEKEVHNIWATHACVPTDPNPQELVLKNVTENFNMWKNDMVDQMHEDIISLWDQSLKPCVKLTPLCVTLHCSTYNNTHNISKEIKNCSFNATTELRDKRRKEYALFYRLDIVPLNKNGRQYRLINCNTSVCTQVCPKLTFDPIPIHYCAPAGYAILKCNNKTFNGTGPCNNVSTVQCTHGIKPVLSTQLLLNGSLAEEEIIIRSENLTDNVKTIIVHLNESVEINCTRPNNNMRKSIRIGPGQTFYALGDIIGDIRQPHCNISEIKWNKTLQRVSEKLREHFNKTIIFNQSSGGDLEITTHSFNCGGEFFYCNTSDLFFNKTFNETYSTGSNSTNSNITLPCRIKQIINMWQEVGRCMYAPPIAGNITCKSNITGLLLTRDGGGNNSTEETFRPGGGNMRDNWRSELYKYKVVEVKPLGIAPTECRRRVVQGGGGSGGGGSAVVGLGAVFLGFLGTAGSTMGAASMTLTVQARQLLGSAGSAGSGSAGSGSAGSGSAGSTVWGFKQLQARVLAIERYLEVQQLLGMWGCSGKLICCTNVPWNSSWSNKTYNEIWDNMTWMQWDREIGNYTDTIYKLLEVSQFQQEINEKDLLALDSWNNLWNWFDISKWLWYIKIFIMIVGGLIGLRIIFAVLSLVNRVRQGISPLSFQTLTPNPRELDRLGGIEEEGGEQDRDRSIRLVS

SEQ ID NO: 240 - protein, 727 aa, synthetic construct
MGWSCIILFLVATATGVHALWVTVYYGVPVWREAKTTLFCASDAKSYEKEVANIWATHACVPTDPNPQELVLKNVTENFNMWKNDMVDQMHEDIISLWDQSLKPCVKLTPLCVTLHCSTYNNTHNISKEIKNCSFNATTELRDKRRKEYALFYRLDIVPLNKNGRQYRLINCNTSVCTQVCPKLTFDPIPIHYCAPAGYAILKCNNKTFNGTGPCNNVSTVQCTHGIKPVLSTQLLLNGSLAEEEIIIRSENLTDNVKTIIVHLNESVEINCTRPNNNTRKSIRIGPGQWFYATGDIIGDIRQAHCNISEIKWNKTLQRVSEKLREHFNKTIIFNQSSGGDLEITTHSFNCGGEFFYCNTSDLFFNKTFNETYSTGSNSTNSNITLPCRIKQIINMWQEVGRCMYASPIAGEITCKSNITGLLLTRDGGGNNSTEETFRPGGGNMRDNWRSELYKYKVVEVKPLGIAPTECRRRVVQGGGGSGGGGSAVVGLGAVFLGFLGTAGSTMGAASMTLTVQARQLLGSAGSAGSGSAGSGSAGSGSAGSTVWGIKQLQARVLAIERYLKDQQLLGMWGCSGKLICCTNVYWNSSWSNKTYNEIWDNMTWMQWDREIDNYTDTIYKLLEVSQKQQEKNEQDLLALDSWNNLWNWFDISKWLWYIKIFIMIVGGLIGLRIIFAVLSLVNRVRQGISPLSFQTLTPNPRELDRLGGIEEEGGEQDRDRSIRLVS

SEQ ID NO: 241 - protein, 727 aa, synthetic construct
MGWSCIILFLVATATGVHALWVTVYYGVPVWREAKTTLFCASDAKSYEKEVANIWATHACVPTDPNPQELVLKNVTENFNMWKNDMVDQMHEDIISLWDQSLKPCVKLTPLCVTLHCSTYNNTHNISKEIKNCSFNATTELRDKRRKEYALFYRLDIVPLNKNGRQYRLINCNTSVCTQVCPKLTFDPIPIHYCAPAGYAILKCNNKTFNGTGPCNNVSTVQCTHGIKPVLSTQLLLNGSLAEEEIIIRSENLTDNVKTIIVHLNESVEINCTRPNNMTRKSIRIGPGQWFYALGDIIGDIRQPHCNISEIKWNKTLQRVSEKLREHFNKTIIFNQSSGGDLEITTHSFNCGGEFFYCNTSDLFFNKTFNETYSTGSNSTNSNITLPCRIKQIINMWQEVGRCMYAPPIAGNITCKSNITGLLLTRDGGGNNSTEETFRPGGGNMRDNWRSELYKYKVVEVKPLGIAPTECRRRVVQGGGGSGGGGSAVVGLGAVFLGFLGTAGSTMGAASMTLTVQARQLLGSAGSAGSGSAGSGSAGSGSAGSTVWGFKQLQARVLAIERYLEVQQLLGMWGCSGKLICCTNVPWNSSWSNKTYNEIWDNMTWMQWDREIGNYTDTIYKLLEVSQFQQEKNEQDLLALDSWNNLWNWFDISKWLWYIKIFIMIVGGLIGLRIIFAVLSLVNRVRQGISPLSFQTLTPNPRELDRLGGIEEEGGEQDRDRSIRLVS

SEQ ID NO: 242 - protein, 851 aa, synthetic construct
MDSKGSSQKGSRLLLLLVVSNLLLPQGVLALWVTVYYGVPVWREAKTTLFCASDAKSYEKEVHNIWATHACVPTDPNPQELVLKNVTENFNMWKNDMVDQMHEDIISLWDQSLKPCVKLTPLCVTLHCSTYNNTHNISKEIKNCSFNATTELRDKRRKEYALFYRLDIVPLNKNGRQYRLINCNTSVITQVCPKLTFDPIPIHYCAPAGYAILKCNNKTFNGTGPCNNVSTVQCTHGIKPVLSTQLLLNGSLAEEEIIIRSENLTDNVKTIIVHLNESVEINCTRPNNNTRKSIRIGPGQTFYATGDIIGDIRQAHCNISEIKWNKTLQRVSEKLREHFNKTIIFNQSSGGDLEITTHSFNCGGEFFYCNTSDLFFNKTFNETYSTGSNSTNSNITLPCRIKQIINMWQEVGRAMYASPIAGEITCKSNITGLLLTRDGGGNNSTEETFRPGGGNMRDNWRSELYKYKVVEVKPLGIAPTECRRRVVQGGGGSGGGGSAVVGLGAVFLGFLGTAGSTMGAASMTLTVQARQLLGSAGSAGSGSAGSGSAGSGSAGSTVWGIKQLQARVLAIERYLKDQQLLGMWGCSGKLICCTNVYWNSSWSNKTYNEIWDNMTWMQWDREIDNYTDTIYKLLEVSQKQQESNEKDLLALDSWNNLWNWFDISKWLWYIKIFIMIVGGLIGLRIIFAVLSLVNRVRQGISPLSFQTLTPNPRELDRLGGIEEEGGEQDRDRSIRLVSGFFSLAWNDLRSLCLFCYHRLRDFILIAGRAVELLGRSSLQGLQRGWEILKYLGSLVQYWGLELKKSAINLFDTIAIAVAEGTDRIIEFLQRIVRAILHIPRRIRQGFEAALQ

SEQ ID NO: 243 - protein, 700 aa, synthetic construct
MDSKGSSQKGSRLLLLLVVSNLLLPQGVLALWVTVYYGVPVWREAKTTLFCASDAKSYEKEVHNIWATHACVPTDPNPQELVLKNVTENFNMWKNDMVDQMHEDIISLWDQSLKPCVKLTPLCVTLHCSTYNNTHNISKEIKNCSFNATTELRDKRRKEYALFYRLDIVPLNKNGRQYRLINCNTSVITQVCPKLTFDPIPIHYCAPAGYAILKCNNKTFNGTGPCNNVSTVQCTHGIKPVLSTQLLLNGSLAEEEIIIRSENLTDNVKTIIVHLNESVEINCTRPNNNTRKSIRIGPGQTFYATGDIIGDIRQAHCNISEIKWNKTLQRVSEKLREHFNKTIIFNQSSGGDLEITTHSFNCGGEFFYCNTSDLFFNKTFNETYSTGSNSTNSNITLPCRIKQIINMWQEVGRAMYASPIAGEITCKSNITGLLLTRDGGGNNSTEETFRPGGGNMRDNWRSELYKYKVVEVKPLGIAPTECRRRVVQGGGGSGGGGSAVVGLGAVFLGFLGTAGSTMGAASMTLTVQARQLLGSAGSAGSGSAGSGSAGSGSAGSTVWGIKQLQARVLAIERYLKDQQLLGMWGCSGKLICCTNVYWNSSWSNKTYNEIWDNMTWMQWDREIDNYTDTIYKLLEVSQKQQESNEKDLLALDSWNNLWNWFDISKWLWYIKIFIMIVGGLIGLRIIFAVLSLVNRVRQGI

SEQ ID NO: 244 - protein, 743 aa, synthetic construct
MDSKGSSQKGSRLLLLLVVSNLLLPQGVLALWVTVYYGVPVWREAKTTLFCASDAKSYEKEVHNIWATHACVPTDPNPQELVLKNVTENFNMWKNDMVDQMHEDIISLWDQSLKPCVKLTPLCVTLHCSTYNNTHNISKEIKNCSFNATTELRDKRRKEYALFYRLDIVPLNKNGRQYRLINCNTSVITQVCPKLTFDPIPIHYCAPAGYAILKCNNKTFNGTGPCNNVSTVQCTHGIKPVLSTQLLLNGSLAEEEIIIRSENLTDNVKTIIVHLNESVEINCTRPNNNTRKSIRIGPGQTFYATGDIIGDIRQAHCNISEIKWNKTLQRVSEKLREHFNKTIIFNQSSGGDLEITTHSFNCGGEFFYCNTSDLFFNKTFNETYSTGSNSTNSNITLPCRIKQIINMWQEVGRAMYASPIAGEITCKSNITGLLLTRDGGGNNSTEETFRPGGGNMRDNWRSELYKYKVVEVKPLGIAPTECRRRVVQGGGGSGGGGSAVVGLGAVFLGFLGTAGSTMGAASMTLTVQARQLLGSAGSAGSGSAGSGSAGSGSAGSTVWGIKQLQARVLAIERYLKDQQLLGMWGCSGKLICCTNVYWNSSWSNKTYNEIWDNMTWMQWDREIDNYTDTIYKLLEVSQKQQESNEKDLLALDSWNNLWNWFDISKWLWYIKIFIMIVGGLIGLRIIFAVLSLVNRVRQGISPLSFQTLTPNPRELDRLGGIEEEGGEQDRDRSIRLVSGFFSL

SEQ ID NO: 245 - protein, 738 aa, synthetic construct
MDSKGSSQKGSRLLLLLVVSNLLLPQGVLALWVTVYYGVPVWREAKTTLFCASDAKSYEKEVHNIWATHACVPTDPNPQELVLKNVTENFNMWKNDMVDQMHEDIISLWDQSLKPCVKLTPLCVTLHCSTYNNTHNISKEIKNCSFNATTELRDKRRKEYALFYRLDIVPLNKNGRQYRLINCNTSVITQVCPKLTFDPIPIHYCAPAGYAILKCNNKTFNGTGPCNNVSTVQCTHGIKPVLSTQLLLNGSLAEEEIIIRSENLTDNVKTIIVHLNESVEINCTRPNNNTRKSIRIGPGQTFYATGDIIGDIRQAHCNISEIKWNKTLQRVSEKLREHFNKTIIFNQSSGGDLEITTHSFNCGGEFFYCNTSDLFFNKTFNETYSTGSNSTNSNITLPCRIKQIINMWQEVGRAMYASPIAGEITCKSNITGLLLTRDGGGNNSTEETFRPGGGNMRDNWRSELYKYKVVEVKPLGIAPTECRRRVVQGGGGSGGGGSAVVGLGAVFLGFLGTAGSTMGAASMTLTVQARQLLGSAGSAGSGSAGSGSAGSGSAGSTVWGIKQLQARVLAIERYLKDQQLLGMWGCSGKLICCTNVYWNSSWSNKTYNEIWDNMTWMQWDREIDNYTDTIYKLLEVSQKQQESNEKDLLALDSWNNLWNWFDISKWLWYIKIFIMIVGGLIGLRIIFAVLSLVNRVRQGISPLSFQTLTPNPRELDRLGGIEEEGGEQDRDRSIRLVS

SEQ ID NO: 246 - protein, 851 aa, synthetic construct
MDSKGSSQKGSRLLLLLVVSNLLLPQGVLALWVTVYYGVPVWREAKTTLFCASDAKSYEKEVHNIWATHACVPTDPNPQELVLKNVTENFNMWKNDMVDQMHEDIISLWDQSLKPCVKLTPLCVTLHCSTYNNTHNISKEIKNCSFNATTELRDKRRKEYALFYRLDIVPLNKNGRQYRLINCNTSVCTQVCPKLTFDPIPIHYCAPAGYAILKCNNKTFNGTGPCNNVSTVQCTHGIKPVLSTQLLLNGSLAEEEIIIRSENLTDNVKTIIVHLNESVEINCTRPNNNTRKSIRIGPGQTFYATGDIIGDIRQAHCNISEIKWNKTLQRVSEKLREHFNKTIIFNQSSGGDLEITTHSFNCGGEFFYCNTSDLFFNKTFNETYSTGSNSTNSNITLPCRIKQIINMWQEVGRCMYASPIAGEITCKSNITGLLLTRDGGGNNSTEETFRPGGGNMRDNWRSELYKYKVVEVKPLGIAPTECRRRVVQGGGGSGGGGSAVVGLGAVFLGFLGTAGSTMGAASMTLTVQARQLLGSAGSAGSGSAGSGSAGSGSAGSTVWGIKQLQARVLAIERYLKDQQLLGMWGCSGKLICCTNVYWNSSWSNKTYNEIWDNMTWMQWDREIDNYTDTIYKLLEVSQKQQESNEKDLLALDSWNNLWNWFDISKWLWYIKIFIMIVGGLIGLRIIFAVLSLVNRVRQGISPLSFQTLTPNPRELDRLGGIEEEGGEQDRDRSIRLVSGFFSLAWNDLRSLCLFCYHRLRDFILIAGRAVELLGRSSLQGLQRGWEILKYLGSLVQYWGLELKKSAINLFDTIAIAVAEGTDRIIEFLQRIVRAILHIPRRIRQGFEAAAA

SEQ ID NO: 247 - DNA, 1956 bp, synthetic construct
  source 1..1956: mol_type = other DNA
gtcgacgccaccatgggctggtcatgcatcatcctgtttctggtggccaccgccacaggcgtccacgctggactttgggtgaccgtctactacggcgtgcctgtgtggagagaagccaagaccaccctgttctgcgcctctgacgctaaaagctacgagaaagaggtccacaacgtgtgggccacccacgcctgcgtgccaacagatcctaaccctcaggagctggttctggaaaatgtgaccgaaaacttcaacatgtggaagaacgacatggtggaccagatgcacgaggacattatctccctctgggatcagtccctgaagccatgtgttaagctgacccctctgtgcgtcacacttaactgctccgacgccaaggtgaacgccacatacaagggcacacgggaagaaattaaaaactgcagcttcaacgccacaaccgagctgcgggacaagaagcggagagagtacgccctgttctatagactggacatcgtgcccctgagcggagaaggcaacaataatagcgaatacagactgatcaactgtaacaccagcgtgatcacccaaatctgccctaaggtgacctttgatcccattcctatccactactgtgcccccgccggatatgccatcctgaagtgcaacaacaagaccttcaacggcaccggaccttgtaacaacgtgagcacagtgcagtgcacacacggcatcaagcccgtggtgtccacacagctgctgctgaatggcagcctggctgaggaagagatcatcatccggtccgagaacctgaccgacaacgtcaagaccatcatcgtgcatctgaacgagagcgtggaaatcacatgcaccagacctaacaacatgaccagaaagagcgtgcggatcggccccggccagaccttttatgcactgggcgacatcatcggcgacatcagacagcctcactgcaacatcagcgagatcaagtgggagaagaccctgcaaagagtgtctgaaaagctgagagagcacttcaacaagaccatcatcttcaaccagagcagcggcggcgacctggaaatcaccacccacagcttcaactgcggcggcgagttcttctactgcaacacaagcgacctgtttttcaacaaaacctttaatgagacatacagcaccggcagcaacagcaccaactctaccatcactctgccttgtagaatcaagcagatcatcaatatgtggcaggaagttggcagagcaatgtacgccccacccatcgccggcaatatcacctgcaagtccaacatcacaggcctgctcctgaccagagatggcggaggcaacaactctacaaaagaaaccttcagacctggcggcggaaacatgagagataattggcggagcgagctgtacaagtacaaagtggtcgaagtgaagcccctgggcatcgcccctaccgagtgcaacagaaccgtggtgcagcgacggagacggcggagggccgtggtgggactgggagccgtgttcctgggtttcctgggcgccgccggcagcacaatgggcgctgcttctaataccctgaccgtgcaggccaggcagctgctgtctggcattgtgcaacaacaaagcaacctgctgagagcccctgaggcccagcagcacatgctgcagttaggggtgtggggcttcaagcagctgcaagctagagtgctggccatcgagagatacctggaggtgcagcagctgctgggcatgtggggatgtagcggcaaactcatctgctgcaccaatgtaccttggaactctagctggagcaacaagacctacaacgaaatctgggataacatgacatggatgcagtgggaccgggaaatcggcaattacacagacaccatatacaagctgctggaggtgagccagttccagcaggagatcaacgagaaggacaacctcacactggactgatgaagatct

SEQ ID NO: 248 - DNA, 1938 bp, synthetic construct
  source 1..1938: mol_type = other DNA
gtcgacgccaccatgggatggagctgcatcatcctgttcctggtggccaccgccacaggagtccatgccgggctgtgggtcaccgtgtactacggcgtgcctgtgtggcgggaagccaagactaccctgttctgcgctagcgacgccaagagctacgagaaggaggttcacaacgtgtgggccacacacgcctgcgtgcccacagatcctaacccccaggagctggtgctggaaaacgtgaccaagaacttcaacatgtggaagaacgacatggtggaccagatgcacgaggacatcatcagcctgtgggaccagagcctgaaaccatgtgtcaagctgacccctctgtgcgtgaccctgcactgcagcacctacaacaacacacacaacatcagcaaggagatcaagaattgctcttttaacgccaccacagagctgagggataagaagaaaaaagagtacgccctgttctatagactggatatcgtgcccctgaacaagaacggcagacagtaccggctgatcaactgtaataccagcgtgatcacccaaatctgccctaaggtgaccttcgaccccatccccatccactactgcgccccagctggctacgcaatcctgaagtgcaacaacaagaccttcaacggcaccggaccttgtaacaatgtgagcaccgtgcaatgcacacatggcatcaagcccgtggtcagcacccagctgctgctcaacggctctctggccgaggaagagatcatcatccggagcgagaacctgaccgataatgtgaaaacaatcatcgttcacctgaacgagagcgtagaaatcacctgtacaagacccaacaacatgaccagaaagtccgtgcggatcggccctggacagaccttttacgccctgggagatatcatcggcgacattagacaacctcactgtaatatcagcgagatcaagtgggagaaaaccctgcaaagagtgtctgaaaagctgcgggaacacttcaacaagacaatcatcttcaaccagagctctggcggcgacctggaaatcacaacacacagcttcaattgcggcggcgagttcttctattgtaacacctccgacctgtttttcaacaagaccttcaatgaaacctacagcaccggcagcaatagcaccaacagcaccattacactgccttgcagaatcaagcagatcatcaacatgtggcaggaggtggggagagctatgtacgcccctcctatcgccggcaacatcacatgcaagtccaatattacaggcctgctgctgacccgggacggcggcggcaacaactctacaaaagagacatttagacctggcggcggcaatatgagagacaattggagaagcgagctgtacaagtacaaggtggtggaagtgaagcctctgggtatcgcccctaccgagtgcaatagaacagtggtgcagcgacgcagacggcggcgggccgtggtgggcctgggcgctgtgttcctgggatttctgggcgccgccggcagcaccatgggcgccgcttctaacaccctgaccgttcaggccagacagctgttgtctggcatcgtgcagcagcagagcaacctgcttagagcccctgaggcccagcaacacatgctgcagctgggcgtgtggggattcaagcagcttcaagctagagtgctcgccatcgagcggtacctggaagtgcagcagctgctgggcatgtggggctgttctggcaagctgatctgctgcaccaacgtgccatggaactccagctggtccaacaagacatacaacgaaatctgggacaacatgacctggatgcagtgggatagagaaatcggcaactacaccgacaccatctacaaactgctggaggtgtcccagttccagcaggaaatcaacgagaaggacaacctgacactcgactgatgaagatct

SEQ ID NO: 249 - protein, 644 aa, synthetic construct
MGWSCIILFLVATATGVHAGLWVTVYYGVPVWREAKTTLFCASDAKSYEKEVHNVWATHACVPTDPNPQELVLENVTENFNMWKNDMVDQMHEDIISLWDQSLKPCVKLTPLCVTLNCSDAKVNATYKGTREEIKNCSFNATTELRDKKRREYALFYRLDIVPLSGEGNNNSEYRLINCNTSVITQICPKVTFDPIPIHYCAPAGYAILKCNNKTFNGTGPCNNVSTVQCTHGIKPVVSTQLLLNGSLAEEEIIIRSENLTDNVKTIIVHLNESVEITCTRPNNMTRKSVRIGPGQTFYALGDIIGDIRQPHCNISEIKWEKTLQRVSEKLREHFNKTIIFNQSSGGDLEITTHSFNCGGEFFYCNTSDLFFNKTFNETYSTGSNSTNSTITLPCRIKQIINMWQEVGRAMYAPPIAGNITCKSNITGLLLTRDGGGNNSTKETFRPGGGNMRDNWRSELYKYKVVEVKPLGIAPTECNRTVVQRRRRRRAVVGLGAVFLGFLGAAGSTMGAASNTLTVQARQLLSGIVQQQSNLLRAPEAQQHMLQLGVWGFKQLQARVLAIERYLEVQQLLGMWGCSGKLICCTNVPWNSSWSNKTYNEIWDNMTWMQWDREIGNYTDTIYKLLEVSQFQQEINEKDNLTLD

SEQ ID NO: 250 - protein, 638 aa, synthetic construct
MGWSCIILFLVATATGVHAGLWVTVYYGVPVWREAKTTLFCASDAKSYEKEVHNVWATHACVPTDPNPQELVLENVTKNFNMWKNDMVDQMHEDIISLWDQSLKPCVKLTPLCVTLHCSTYNNTHNISKEIKNCSFNATTELRDKKKKEYALFYRLDIVPLNKNGRQYRLINCNTSVITQICPKVTFDPIPIHYCAPAGYAILKCNNKTFNGTGPCNNVSTVQCTHGIKPVVSTQLLLNGSLAEEEIIIRSENLTDNVKTIIVHLNESVEITCTRPNNMTRKSVRIGPGQTFYALGDIIGDIRQPHCNISEIKWEKTLQRVSEKLREHFNKTIIFNQSSGGDLEITTHSFNCGGEFFYCNTSDLFFNKTFNETYSTGSNSTNSTITLPCRIKQIINMWQEVGRAMYAPPIAGNITCKSNITGLLLTRDGGGNNSTKETFRPGGGNMRDNWRSELYKYKVVEVKPLGIAPTECNRTVVQRRRRRRAVVGLGAVFLGFLGAAGSTMGAASNTLTVQARQLLSGIVQQQSNLLRAPEAQQHMLQLGVWGFKQLQARVLAIERYLEVQQLLGMWGCSGKLICCTNVPWNSSWSNKTYNEIWDNMTWMQWDREIGNYTDTIYKLLEVSQFQQEINEKDNLTLD

SEQ ID NO: 251 - protein, 853 aa, synthetic construct
MRVMGIQRNCQHLLTWGIMILGTIIFCSAVENLWVTVYYGVPVWRDADTTLFCASDAKAYETEKHNVWATHACVPTDPNPQEIHLDNVTEKFNMWKNNMVEQMHTDIISLWDQSLKPCVKLTPLCVTLHCTNVTSVNTTGDREGLKNCSFNMTTELRDKRQKVYSLFYRLDIVPINENQGSEYRLINCNTSAITQACPKVSFEPIPIHYCTPAGFAILKCKDEGFNGTGLCKNVSTVQCTHGIKPVVSTQLLLNGSLAEKNITIRSENITNNAKIIIVQLVQPVTIKCIRPNNNTRKSIRIGPGQAFYATGDIIGDIRQAHCNVTRSRWNKTLQEVAEKLRTYFGNKTIIFANSSGGDLEITTHSFNCGGEFFYCNTSGLFNSTWYVNSTWNDTDSTQESNDTITLPCRIKQIINMWQRAGQAMYAPPIPGVIKCESNITGLLLTRDGGKDNNVNETFRPGGGDMRDNWRSELYKYKVVEIEPLGVAPTRAKRRVVEREKRAVGIGAVFLGFLGAAGSTMGAASITLTVQARQLLSGIVQQQNNLLRAIEAQQHLLKLTVWGIKQLQARVLAVERYLRDQQLLGIWGCSGKLICTTNVPWNSSWSNKSLDEIWNNMTWLQWDKEINNYTQLIYRLIEESQNQQEKNEKELLELDKWANLWSWFDISNWLWYIKIFIIIVGGLIGLRIVFAVLSVINRVRQGYSPLSFQTHTPNPRGLDRPERIEEEDGEQGRGRSIRLVSGFLALAWDDLRSLCLFSYHRLRDFILIAARTVELLGHSSLKGLRLGWEGIKYLWNLLSYWGRELKISAINLVDTIAIAVAGWTDRVIEIAQRIGRAILHIPVRIRQGLERALL

SEQ ID NO: 252 - protein, 850 aa, synthetic construct
MRVMGIQRNCQHLLTWGIMILGTIIFCSAVENLWVTVYYGVPVWRDADTTLFCASDAKAYETEKHNVWATHACVPTDPNPQEIHLDNVTEKFNMWKNNMVEQMHTDIISLWDQSLKPCVKLTPLCVTLHCSTYNNTHNISKEMKNCSFNMTTELRDKRRKVHSLFYRLDIVPINKNGRQYRLINCNTSAITQACPKVSFEPIPIHYCTPAGFAILKCKDEGFNGTGLCKNVSTVQCTHGIKPVVSTQLLLNGSLAEKNITIRSENITNNAKIIIVQLVQPVTIKCIRPNNNTRKSIRIGPGQAFYATGDIIGDIRQAHCNVTRSRWNKTLQEVAEKLRTYFGNKTIIFANSSGGDLEITTHSFNCGGEFFYCNTSGLFNSTWYVNSTWNDTDSTQESNDTITLPCRIKQIINMWQRAGQAMYAPPIPGVIKCESNITGLLLTRDGGKDNNVNETFRPGGGDMRDNWRSELYKYKVVEIEPLGVAPTRAKRRVVEREKRAVGIGAVFLGFLGAAGSTMGAASITLTVQARQLLSGIVQQQNNLLRAIEAQQHLLKLTVWGIKQLQARVLAVERYLRDQQLLGIWGCSGKLICTTNVPWNSSWSNKSLDEIWNNMTWLQWDKEINNYTQLIYRLIEESQNQQEKNEKELLELDKWANLWSWFDISNWLWYIKIFIIIVGGLIGLRIVFAVLSVINRVRQGYSPLSFQTHTPNPRGLDRPERIEEEDGEQGRGRSIRLVSGFLALAWDDLRSLCLFSYHRLRDFILIAARTVELLGHSSLKGLRLGWEGIKYLWNLLSYWGRELKISAINLVDTIAIAVAGWTDRVIEIAQRIGRAILHIPVRIRQGLERALL

SEQ ID NO: 253 - protein, 850 aa, synthetic construct
MRVMGIQRNCQHLLTWGIMILGTIIFCSAVENLWVTVYYGVPVWRDADTTLFCASDAKAYETEKHNVWATHACVPTDPNPQEIHLDNVTEKFNMWKNNMVEQMHTDIISLWDQSLKPCVKLTPLCVTLHCSTYNNTHNISKEMKNCSFNMTTELRDKRRKVHSLFYRLDIVPINKNGRQYRLINCNTSAITQACPKVSFEPIPIHYCTPAGFAILKCKDEGFNGTGLCKNVSTVQCTHGIKPVVSTQLLLNGSLAEKNITIRSENITNNAKIIIVQLVQPVTINCTRPNNNTRKSIRIGPGQAFYATGDIIGDIRQAHCNVTRSRWNKTLQEVAEKLRTYFGNKTIIFANSSGGDLEITTHSFNCGGEFFYCNTSGLFNSTWYVNSTWNDTDSTQESNDTITLPCRIKQIINMWQRAGQAMYAPPIPGVIKCESNITGLLLTRDGGNDTNVNETFRPGGGDMRDNWRSELYKYKVVEIEPLGVAPTRAKRRVVEREKRAVGIGAVFLGFLGAAGSTMGAASITLTVQARQLLSGIVQQQNNLLRAIEAQQHLLKLTVWGIKQLQARVLAVERYLRDQQLLGIWGCSGKLICTTNVPWNSSWSNKSLDEIWNNMTWLQWDKEINNYTQLIYRLIEESQNQQEKNEKELLELDKWANLWSWFDISNWLWYIKIFIIIVGGLIGLRIVFAVLSVINRVRQGYSPLSFQTHTPNPRGLDRPERIEEEDGEQGRGRSIRLVSGFLALAWDDLRSLCLFSYHRLRDFILIAARTVELLGHSSLKGLRLGWEGIKYLWNLLSYWGRELKISAINLVDTIAIAVAGWTDRVIEIAQRIGRAILHIPVRIRQGLERALL

SEQ ID NO: 254 - protein, 850 aa, synthetic construct
MRVMGIQRNCQHLLTWGIMILGTIIFCSAVENLWVTVYYGVPVWRDADTTLFCASDAKAYETEKHNVWATHACVPTDPNPQEIHLDNVTEKFNMWKNNMVEQMHTDIISLWDQSLKPCVKLTPLCVTLHCSTYNNTHNISKGLKNCSFNMTTELRDKRRKVHSLFYRLDIVPINKNGRQYRLINCNTSAITQACPKVSFEPIPIHYCTPAGFAILKCKDEGFNGTGLCKNVSTVQCTHGIKPVVSTQLLLNGSLAEKNITIRSENITNNAKIIIVQLVQPVTIKCIRPNNNTRKSIRIGPGQAFYATGDIIGDIRQAHCNVTRSRWNKTLQEVAEKLRTYFGNKTIIFANSSGGDLEITTHSFNCGGEFFYCNTSGLFNSTWYVNSTWNDTDSTQESNDTITLPCRIKQIINMWQRAGQAMYAPPIPGVIKCESNITGLLLTRDGGKDNNVNETFRPGGGDMRDNWRSELYKYKVVEIEPLGVAPTRAKRRVVEREKRAVGIGAVFLGFLGAAGSTMGAASITLTVQARQLLSGIVQQQNNLLRAIEAQQHLLKLTVWGIKQLQARVLAVERYLRDQQLLGIWGCSGKLICTTNVPWNSSWSNKSLDEIWNNMTWLQWDKEINNYTQLIYRLIEESQNQQEKNEKELLELDKWANLWSWFDISNWLWYIKIFIIIVGGLIGLRIVFAVLSVINRVRQGYSPLSFQTHTPNPRGLDRPERIEEEDGEQGRGRSIRLVSGFLALAWDDLRSLCLFSYHRLRDFILIAARTVELLGHSSLKGLRLGWEGIKYLWNLLSYWGRELKISAINLVDTIAIAVAGWTDRVIEIAQRIGRAILHIPVRIRQGLERALL

SEQ ID NO: 255 - protein, 850 aa, synthetic construct
MRVMGIQRNCQHLLTWGIMILGTIIFCSAVENLWVTVYYGVPVWRDADTTLFCASDAKAYETEKHNVWATHACVPTDPNPQEIHLDNVTEKFNMWKNNMVEQMHTDIISLWDQSLKPCVKLTPLCVTLHCSTYNNTHNISKGLKNCSFNMTTELRDKRRKVHSLFYRLDIVPINKNGRQYRLINCNTSAITQACPKVSFEPIPIHYCTPAGFAILKCKDEGFNGTGLCKNVSTVQCTHGIKPVVSTQLLLNGSLAEKNITIRSENITNNAKIIIVQLVQPVTINCTRPNNNTRKSIRIGPGQAFYATGDIIGDIRQAHCNVTRSRWNKTLQEVAEKLRTYFGNKTIIFANSSGGDLEITTHSFNCGGEFFYCNTSGLFNSTWYVNSTWNDTDSTQESNDTITLPCRIKQIINMWQRAGQAMYAPPIPGVIKCESNITGLLLTRDGGNDTNVNETFRPGGGDMRDNWRSELYKYKVVEIEPLGVAPTRAKRRVVEREKRAVGIGAVFLGFLGAAGSTMGAASITLTVQARQLLSGIVQQQNNLLRAIEAQQHLLKLTVWGIKQLQARVLAVERYLRDQQLLGIWGCSGKLICTTNVPWNSSWSNKSLDEIWNNMTWLQWDKEINNYTQLIYRLIEESQNQQEKNEKELLELDKWANLWSWFDISNWLWYIKIFIIIVGGLIGLRIVFAVLSVINRVRQGYSPLSFQTHTPNPRGLDRPERIEEEDGEQGRGRSIRLVSGFLALAWDDLRSLCLFSYHRLRDFILIAARTVELLGHSSLKGLRLGWEGIKYLWNLLSYWGRELKISAINLVDTIAIAVAGWTDRVIEIAQRIGRAILHIPVRIRQGLERALL

SEQ ID NO: 256 - DNA, 1977 bp, synthetic construct
  source 1..1977: mol_type = other DNA
gtcgacgccaccatgcctatgggatctctgcagcctctggccacactgtacctgctgggaatgctggtggcttctgtgctggccgccgagaatctgtgggtcacagtgtactatggcgtgcccgtttggagggacgccgagacaacactgttttgtgcctccgacgccaaggcctacgagacaaagaaacggaacgtgtgggccacacactgctgcgtgccaacagaccccaatcctcaagagatccacctggacaacgtgaccgagaagttcaacatgtggaagaacaacatggtcgagcagatgcacaccgacatcatcagcctgtgggaccagagcctgaagccttgcgtgaagctgacccctctgtgtgtgaccctgcactgcaccaatgtgaccagcgtgaacaccaccggcgatagagagggcctgaagaactgcagcttcaacatgaccaccgagctgcgggacaagcggcagaaggtgtacagcctgttctaccggctggacatcgtgcccatcaacgagaatcagggcagcgagtaccggctgatcaactgcaacaccagcgccatcactcaggcctgtcctaaggtgtccttcgagcccattcctatccactactgtacccctgccggcttcgccatcctgaagtgcaaggacgagggcttcaatggcaccggcctgtgcaagaatgtgtccaccgtgcagtgtacccacggcatcaagccagtggtgtctacccagctgctgctgaatggaagcctggccgagaagaacatcaccatcagaagcgagaatatcaccaacaacgccaagatcatcatcgtgcagctggtgcagcccgtgaccatcaagtgcatcagacccaacaacaacacccggaagtccatcagaatcggccctggccagtggttttacgccaccggggatatcatcggcgacatcagacaggcccactgcaacgtgacacggtccagatggaacaagaccctgcaagaggtggccgaaaagctgcggacctacttcggcaacaagaccatcatcttcgccaacagctctggcggcgacctggaaatcaccacacacagcttcaattgtggcggcgagttcttctactgcaatacctccggcctgttcaacagcacttggtacgtgaacagcacctggaacgacaccgacagcacccaagagagcaacgacaccatcacactgccctgccggatcaagcagatcatcaatatgtggcagcgcgcaggccaggctatgtacgctcctcctattcctggcgtgatcaagtgcgagagcaacatcacaggcctgctgctcacaagagatggcggcaaggacaacaacgtgaacgaaaccttcagacccggcggaggcgacatgagagacaattggagaagcgagctgtacaagtacaaggtggtcaagatcgagcccctgggcgtcgcacctacacggtgcaagagaagagtcgtgggccgtcgtagaaggcggagagccgttggaattggcgccgtgttcctgggctttctgggagccgctggatctacaatgggcgctgccagcatgaccctgacagtgcaggctagaaatctgctgagcggcatcgtccagcagcagagcaatctgctcagagcccctgagtgccagcagcatctgctgaaactgaccgtgtggggaatcaagcagctgcaggcaagagtgctggctgtggaaagatacctgcgggaccagcagctcctcggcatctggggatgttctggcaagctgatctgctgcaccaacgtgccctggaacagctcctggtccaacagaaacctgagcgagatctgggacaatatgacctggctgcagtgggacaaagagatcagcaactacacccagatcatctacggcctgctggaagagagccagaaccagcaagagaaaaacgagcaggacctgctggccctggactgataaggatcc

SEQ ID NO: 257 - protein, 651 aa, synthetic construct
MPMGSLQPLATLYLLGMLVASVLAAENLWVTVYYGVPVWRDAETTLFCASDAKAYETKKRNVWATHCCVPTDPNPQEIHLDNVTEKFNMWKNNMVEQMHTDIISLWDQSLKPCVKLTPLCVTLHCTNVTSVNTTGDREGLKNCSFNMTTELRDKRQKVYSLFYRLDIVPINENQGSEYRLINCNTSAITQACPKVSFEPIPIHYCTPAGFAILKCKDEGFNGTGLCKNVSTVQCTHGIKPVVSTQLLLNGSLAEKNITIRSENITNNAKIIIVQLVQPVTIKCIRPNNNTRKSIRIGPGQWFYATGDIIGDIRQAHCNVTRSRWNKTLQEVAEKLRTYFGNKTIIFANSSGGDLEITTHSFNCGGEFFYCNTSGLFNSTWYVNSTWNDTDSTQESNDTITLPCRIKQIINMWQRAGQAMYAPPIPGVIKCESNITGLLLTRDGGKDNNVNETFRPGGGDMRDNWRSELYKYKVVKIEPLGVAPTRCKRRVVGRRRRRRAVGIGAVFLGFLGAAGSTMGAASMTLTVQARNLLSGIVQQQSNLLRAPECQQHLLKLTVWGIKQLQARVLAVERYLRDQQLLGIWGCSGKLICCTNVPWNSSWSNRNLSEIWDNMTWLQWDKEISNYTQIIYGLLEESQNQQEKNEQDLLALD

SEQ ID NO: 258 - protein, 646 aa, synthetic construct
MGWSCIILFLVATATGVHALWVTVYYGVPVWREACTTLFCASDAKSYEKKVRNVWATHCCVPTDPNPQELVLKNVTENFNMWKNDMVDQMHEDIISLWDQSLKPCVKLTPLCVTLHCSTYNNTHNISKEIKNCSFNATTELRDKRKKEYALFYRLDIVPLNKNGRQYRLINCNTSVCTQACPKVTFDPIPIHYCAPAGYAILKCNNKTFNGTGPCNNVSTVQCTHGIKPVVSTQLLLNGSLAEEEIIIRSENLTDNVKTIIVHLNESVEINCTRPNNNTRKSIRIGPGQWFYATGDIIGDIRQAHCNISEIKWNKTLQRVSEKLREHFNKTIIFNQSSGGDLEITTHYFNCGGEFFYCNTSDLFFNKTFNETYSTGSNSTNSNITLPCRIKQIINMWQEVGRCMYASPIAGEITCKSNITGLLLTRDGGGNNSTEETFRPGGGNMRDNWRSELYKYKVVEVKPLGIAPTECRRRVVQRRRRRRAVVGLGAVFLGFLGTAGSTMGAASMTLTVQARQLLGSAGSAGSGSAGSGSAGSGSAGSTVWGIKQLQARVLAIERYLKDQQLLGMWGCSGKLICCTNVYWNSSWSNKTYNEIWDNMTWMQWDREIDNYTDTIYKLLEVSQKQQEKNEQDLLALDGSGLPSTGG

SEQ ID NO: 259 - protein, 646 aa, synthetic construct
MGWSCIILFLVATATGVHALWVTVYYGVPVWREAKTTLFCASDAKSYEKEVHNVWATHACVPTDPNPQELVLKNVTENFNMWKNDMVDQMHEDIISLWDQSLKPCVKLTPLCVTLHCSTYNNTHNISKEIKNCSFNATTELRDKRKKEYALFYRLDIVPLNKNGRQYRLINCNTSVCTQACPKVTFDPIPIHYCAPAGYAILKCNNKTFNGTGPCNNVSTVQCTHGIKPVVSTQLLLNGSLAEEEIIIRSENLTDNVKTIIVHLNESVEINCTRPNNNTRKSIRIGPGQTFYATGDIIGDIRQAHCNISEIKWNKTLQRVSEKLREHFNKTIIFNQSSGGDLEITTHYFNCGGEFFYCNTSDLFFNKTFNETYSTGSNSTNSNITLPCRIKQIINMWQEVGRCMYASPIAGEITCKSNITGLLLTRDGGGNNSTEETFRPGGGNMRDNWRSELYKYKVVEVKPLGIAPTECRRRVVQRRRRRRAVVGLGAVFLGFLGTAGSTMGAASMTLTVQARQLLGSAGSAGSGSAGSGSAGSGSAGSTVWGIKQLQARVLAIERYLKDQQLLGMWGCSGKLICCTNVYWNSSWSNKTYNEIWDNMTWMQWDREIDNYTDTIYKLLEVSQKQQESNEQDLLALDGSGLPSTGG

SEQ ID NO: 260 - protein, 633 aa, synthetic construct
MGWSCIILFLVATATGVHALWVTVYYGVPVWREACTTLFCASDAKSYEKKVRNVWATHCCVPTDPNPQELVLKNVTENFNMWKNDMVDQMHEDIISLWDQSLKPCVKLTPLCVTLHCSTYNNTHNISKEIKNCSFNATTELRDKRKKEYALFYRLDIVPLNKNGRQYRLINCNTSVCTQACPKVTFDPIPIHYCAPAGYAILKCNNKTFNGTGPCNNVSTVQCTHGIKPVVSTQLLLNGSLAEEEIIIRSENLTDNVKTIIVHLNESVEINCTRPNNNTRKSIRIGPGQWFYATGDIIGDIRQAHCNISEIKWNKTLQRVSEKLREHFNKTIIFNQSSGGDLEITTHYFNCGGEFFYCNTSDLFFNKTFNETYSTGSNSTNSNITLPCRIKQIINMWQEVGRCMYASPIAGEITCKSNITGLLLTRDGGGNNSTEETFRPGGGNMRDNWRSELYKYKVVEVKPLGIAPTECRRRVVQRRRRRRAVVGLGAVFLGFLGTAGSTMGAASMTLTVQARQLLSGNPDWLPDMTVWGIKQLQARVLAIERYLKDQQLLGMWGCSGKLICCTNVYWNSSWSNKTYNEIWDNMTWMQWDREIDNYTDTIYKLLEVSQKQQEKNEQDLLALDGSGLPSTGG

SEQ ID NO: 261 - protein, 633 aa, synthetic construct
MGWSCIILFLVATATGVHALWVTVYYGVPVWREAKTTLFCASDAKSYEKEVHNVWATHACVPTDPNPQELVLKNVTENFNMWKNDMVDQMHEDIISLWDQSLKPCVKLTPLCVTLHCSTYNNTHNISKEIKNCSFNATTELRDKRKKEYALFYRLDIVPLNKNGRQYRLINCNTSVCTQACPKVTFDPIPIHYCAPAGYAILKCNNKTFNGTGPCNNVSTVQCTHGIKPVVSTQLLLNGSLAEEEIIIRSENLTDNVKTIIVHLNESVEINCTRPNNNTRKSIRIGPGQTFYATGDIIGDIRQAHCNISEIKWNKTLQRVSEKLREHFNKTIIFNQSSGGDLEITTHYFNCGGEFFYCNTSDLFFNKTFNETYSTGSNSTNSNITLPCRIKQIINMWQEVGRCMYASPIAGEITCKSNITGLLLTRDGGGNNSTEETFRPGGGNMRDNWRSELYKYKVVEVKPLGIAPTECRRRVVQRRRRRRAVVGLGAVFLGFLGTAGSTMGAASMTLTVQARQLLSGNPDWLPDMTVWGIKQLQARVLAIERYLKDQQLLGMWGCSGKLICCTNVYWNSSWSNKTYNEIWDNMTWMQWDREIDNYTDTIYKLLEVSQKQQESNEQDLLALDGSGLPSTGG

SEQ ID NO: 262 - protein, 653 aa, synthetic construct
MPMGSLQPLATLYLLGMLVASVLAAENLWVTVYYGVPVWREAKTTLFCASDAKSYEKEVHNVWATHACVPTDPNPQELVLKNVTENFNMWKNDMVDQMHEDIISLWDQSLKPCVKLTPLCVTLHCSTYNNTHNISKEIKNCSFNATTELRDKRKKEYALFYRLDIVPLNKNGRQYRLINCNTSVCTQACPKVTFDPIPIHYCAPAGYAILKCNNKTFNGTGPCNNVSTVQCTHGIKPVVSTQLLLNGSLAEEEIIIRSENLTDNVKTIIVHLNESVEINCTRPNNNTRKSIRIGPGQTFYATGDIIGDIRQAHCNISEIKWNKTLQRVSEKLREHFNKTIIFNQSSGGDLEITTHYFNCGGEFFYCNTSDLFFNKTFNETYSTGSNSTNSNITLPCRIKQIINMWQEVGRCMYASPIAGEITCKSNITGLLLTRDGGGNNSTEETFRPGGGNMKDNWRSELYKYKVVKIEPLGVAPTRCKRRVVGRRRRRRAVGIGAVFLGFLGAAGSTMGAASMTLTVQARNLLSGIVQQQSNLLRAPEAQQHLLKLTVWGIKQLQARVLAVERYLRDQQLLGIWGCSGKLICCTNVPWNSSWSNRNLSEIWDNMTWLQWDKEISNYTQIIYGLLEESQNQQEKNEQDLLALDGSGLPSTGG

SEQ ID NO: 263 - protein, 652 aa, synthetic construct
MGWSCIILFLVATATGVHAGLWVTVYYGVPVWREAKTTLFCASDAKSYEKEVHNVWATHACVPTDPNPQELVLENVTENFNMWKNDMVDQMHEDIISLWDQSLKPCVKLTPLCVTLHCSTYNNTHNISKEIKNCSFNATTELRDKKRKEYALFYRLDIVPLNKNGRQYRLINCNTSVITQICPKVTFDPIPIHYCAPAGYAILKCNNKTFNGTGPCNNVSTVQCTHGIKPVVSTQLLLNGSLAEEEIIIRSENLTDNVKTIIVHLNESVEINCTRPNNMTRKSVRIGPGQTFYALGDIIGDIRQPHCNISEIKWNKTLQRVSEKLREHFNKTIIFNQSSGGDLEITTHSFNCGGEFFYCNTSDLFFNKTFNETYSTGSNSTNSNITLPCRIKQIINMWQEVGRAMYAPPIAGNITCKSNITGLLLTRDGGGNNSTKETFRPGGGNMRDNWRSELYKYKVVEVKPLGIAPTECNRTVVQLNQQAVILNQQAVIAVVGLGAVFLGFLGAAGSTMGAASNTLTVQARQLLSGIVQQQSNLLRAPEAQQHMLQLGVWGFKQLQARVLAIERYLEVQQLLGMWGCSGKLICCTNVPWNSSWSNKTYNEIWDNMTWMQWDREIGNYTDTIYKLLEVSQFQQEINEKDNLTLDLPETGG

SEQ ID NO: 264 - protein, 644 aa, synthetic construct
MGWSCIILFLVATATGVHAGLWVTVYYGVPVWREAKTTLFCASDAKSYEKEVHNVWATHACVPTDPNPQELVLENVTENFNMWKNDMVDQMHEDIISLWDQSLKPCVKLTPLCVTLHCSTYNNTHNISKEIKNCSFNATTELRNKKRKEYALFYRLDIVPLNKNGRQYRLINCNTSVITQICPKVTFDPIPIHYCAPAGYAILKCNNKTFNGTGPCNNVSTVQCTHGIKPVVSTQLLLNGSLAEEEIIIRSENLTDNVKTIIVHLNESVEINCTRPNNMTRKSVRIGPGQTFYALGDIIGDIRQPHCNISEIKWNKTLQRVSEKLREHFNKTIIFNQSSGGDLEITTHSFNCGGEFFYCNTSDLFFNKTFNETYSTGSNSTNSNITLPCRIKQIINMWQEVGRAMYAPPIAGNITCKSNITGLLLTRDGGGNNSTKETFRPGGGNMRDNWRSELYKYKVVEVKPLGIAPTECNRTVVQRRRRRRAVVGLGAVFLGFLGAAGSTMGAASNTLTVQARQLLSGIVQQQSNLLRAPEAQQHMLQLGVWGFKQLQARVLAIERYLEVQQLLGMWGCSGKLICCTNVPWNSSWSNKTYNEIWDNMTWMQWDREIGNYTDTIYKLLEVSQFQQEINEKDNLTLDLPETGG

SEQ ID NO: 265 - protein, 644 aa, synthetic construct
MGWSCIILFLVATATGVHAGLWVTVYYGVPVWREAKTTLFCASDAKSYEKEVHNVWATHACVPTDPNPQELVLENVTENFNMWKNDMVDQMHEDIISLWDQSLKPCVKLTPLCVTLHCSTYNNTHNISKEIKNCSFNATTELRDKKKKEYALFYRLDIVPLNKNGRQYRLINCNTSVITQICPKVTFDPIPIHYCAPAGYAILKCNNKTFNGTGPCNNVSTVQCTHGIKPVVSTQLLLNGSLAEEEIIIRSENLTDNVKTIIVHLNESVEINCTRPNNMTRKSVRIGPGQTFYALGDIIGDIRQPHCNISEIKWNKTLQRVSEKLREHFNKTIIFNQSSGGDLEITTHSFNCGGEFFYCNTSDLFFNKTFNETYSTGSNSTNSNITLPCRIKQIINMWQEVGRAMYAPPIAGNITCKSNITGLLLTRDGGGNNSTKETFRPGGGNMRDNWRSELYKYKVVEVKPLGIAPTECNRTVVQRRRRRRAVVGLGAVFLGFLGAAGSTMGAASNTLTVQARQLLSGIVQQQSNLLRAPEAQQHMLQLGVWGFKQLQARVLAIERYLEVQQLLGMWGCSGKLICCTNVPWNSSWSNKTYNEIWDNMTWMQWDREIGNYTDTIYKLLEVSQFQQEINEKDNLTLDLPETGG

SEQ ID NO: 266 - protein, 664 aa, synthetic construct
MGWSCIILFLVATATGVHAGLWVTVYYGVPVWREAKTTLFCASDAKSYEKEVHNVWATHACVPTDPNPQELVLENVTENFNMWKNDMVDQMHEDIISLWDQSLKPCVKLTPLCVTLHCSTYNNTHNISKEIKNCSFNATTELRDKKRKEYALFYRLDIVPLNKNGRQYRLINCNTSVITQICPKVTFDPIPIHYCAPAGYAILKCNNKTFNGTGPCNNVSTVQCTHGIKPVVSTQLLLNGSLAEEEIIIRSENLTDNVKTIIVHLNESVEINCTRPNNMTRKSVRIGPGQTFYALGDIIGDIRQPHCNISEIKWNKTLQRVSEKLREHFNKTIIFNQSSGGDLEITTHSFNCGGEFFYCNTSDLFFNKTFNETYSTGSNSTNSNITLPCRIKQIINMWQEVGRAMYAPPIAGNITCKSNITGLLLTRDGGGNNSTKETFRPGGGNMRDNWRSELYKYKVVEVKPLGIAPTECNRTVVQRRRRRRAVVGLGAVFLGFLGAAGSTMGAASNTLTVQARQLLSGIVQQQSNLLRAPEAQQHMLQLGVWGFKQLQARVLAIERYLEVQQLLGMWGCSGKLICCTNVPWNSSWSNKTYNEIWDNMTWMQWDREIGNYTDTIYKLLEVSQFQQEINEKDNLTLDGGGLVPQQSGGLNDIFEAQKIEWHEG

SEQ ID NO: 267 - protein, 664 aa, synthetic construct
MGWSCIILFLVATATGVHAGLWVTVYYGVPVWREAKTTLFCASDAKSYEKEVHNVWATHACVPTDPNPQELVLENVTENFNMWKNDMVDQMHEDIISLWDQSLKPCVKLTPLCVTLHCSTYNNTHNISKEIKNCSFNATTELRNKKRKEYALFYRLDIVPLNKNGRQYRLINCNTSVITQICPKVTFDPIPIHYCAPAGYAILKCNNKTFNGTGPCNNVSTVQCTHGIKPVVSTQLLLNGSLAEEEIIIRSENLTDNVKTIIVHLNESVEINCTRPNNMTRKSVRIGPGQTFYALGDIIGDIRQPHCNISEIKWNKTLQRVSEKLREHFNKTIIFNQSSGGDLEITTHSFNCGGEFFYCNTSDLFFNKTFNETYSTGSNSTNSNITLPCRIKQIINMWQEVGRAMYAPPIAGNITCKSNITGLLLTRDGGGNNSTKETFRPGGGNMRDNWRSELYKYKVVEVKPLGIAPTECNRTVVQRRRRRRAVVGLGAVFLGFLGAAGSTMGAASNTLTVQARQLLSGIVQQQSNLLRAPEAQQHMLQLGVWGFKQLQARVLAIERYLEVQQLLGMWGCSGKLICCTNVPWNSSWSNKTYNEIWDNMTWMQWDREIGNYTDTIYKLLEVSQFQQEINEKDNLTLDGGGLVPQQSGGLNDIFEAQKIEWHEG

SEQ ID NO: 268 - protein, 664 aa, synthetic construct
MGWSCIILFLVATATGVHAGLWVTVYYGVPVWREAKTTLFCASDAKSYEKEVHNVWATHACVPTDPNPQELVLENVTENFNMWKNDMVDQMHEDIISLWDQSLKPCVKLTPLCVTLHCSTYNNTHNISKEIKNCSFNATTELRDKKKKEYALFYRLDIVPLNKNGRQYRLINCNTSVITQICPKVTFDPIPIHYCAPAGYAILKCNNKTFNGTGPCNNVSTVQCTHGIKPVVSTQLLLNGSLAEEEIIIRSENLTDNVKTIIVHLNESVEINCTRPNNMTRKSVRIGPGQTFYALGDIIGDIRQPHCNISEIKWNKTLQRVSEKLREHFNKTIIFNQSSGGDLEITTHSFNCGGEFFYCNTSDLFFNKTFNETYSTGSNSTNSNITLPCRIKQIINMWQEVGRAMYAPPIAGNITCKSNITGLLLTRDGGGNNSTKETFRPGGGNMRDNWRSELYKYKVVEVKPLGIAPTECNRTVVQRRRRRRAVVGLGAVFLGFLGAAGSTMGAASNTLTVQARQLLSGIVQQQSNLLRAPEAQQHMLQLGVWGFKQLQARVLAIERYLEVQQLLGMWGCSGKLICCTNVPWNSSWSNKTYNEIWDNMTWMQWDREIGNYTDTIYKLLEVSQFQQEINEKDNLTLDGGGLVPQQSGGLNDIFEAQKIEWHEG

SEQ ID NO: 269 - protein, 738 aa, synthetic construct
MDSKGSSQKGSRLLLLLVVSNLLLPQGVLALWVTVYYGVPVWREAKTTLFCASDAKSYEKEVANIWATHACVPTDPNPQELVLKNVTENFNMWKNDMVDQMHEDIISLWDQSLKPCVKLTPLCVTLHCSTYNNTHNISKEIKNCSFNATTELRDKRRKEYALFYRLDIVPLNKNGRQYRLINCNTSVCTQVCPKLTFDPIPIHYCAPAGYAILKCNNKTFNGTGPCNNVSTVQCTHGIKPVLSTQLLLNGSLAEEEIIIRSENLTDNVKTIIVHLNESVEINCTRPNNMTRKSIRIGPGQWFYALGDIIGDIRQPHCNISEIKWNKTLQRVSEKLREHFNKTIIFNQSSGGDLEITTHSFNCGGEFFYCNTSDLFFNKTFNETYSTGSNSTNSNITLPCRIKQIINMWQEVGRCMYAPPIAGNITCKSNITGLLLTRDGGGNNSTEETFRPGGGNMRDNWRSELYKYKVVEVKPLGIAPTECRRRVVQGGGGSGGGGSAVVGLGAVFLGFLGTAGSTMGAASMTLTVQARQLLGSAGSAGSGSAGSGSAGSGSAGSTVWGFKQLQARVLAIERYLEVQQLLGMWGCSGKLICCTNVPWNSSWSNKTYNEIWDNMTWMQWDREIGNYTDTIYKLLEVSQFQQEKNEQDLLALDSWNNLWNWFDISKWLWYIKIFIMIVGGLIGLRIIFAVLSLVNRVRQGISPLSFQTLTPNPRELDRLGGIEEEGGEQDRDRSIRLVS

SEQ ID NO: 270 - protein, 840 aa, synthetic construct
MGWSCIILFLVATATGVHALWVTVYYGVPVWREAKTTLFCASDAKSYEKEVHNIWATHACVPTDPNPQELVLKNVTENFNMWKNDMVDQMHEDIISLWDQSLKPCVKLTPLCVTLHCSTYNNTHNISKEIKNCSFNATTELRNKRRKEYALFYRLDIVPLNKNGRQYRLINCNTSVITQVCPKLTFDPIPIHYCAPAGYAILKCNNKTFNGTGPCNNVSTVQCTHGIKPVLSTQLLLNGSLAEEEIIIRSENLTDNVKTIIVHLNESVEINCTRPNNNTRKSIRIGPGQTFYATGDIIGDIRQAHCNISEIKWNKTLQRVSEKLREHFNKTIIFNQSSGGDLEITTHSFNCGGEFFYCNTSDLFFNKTFNETYSTGSNSTNSNITLPCRIKQIINMWQEVGRAMYASPIAGEITCKSNITGLLLTRDGGGNNSTEETFRPGGGNMRDNWRSELYKYKVVEVKPLGIAPTECRRRVVQGGGGSGGGGSAVVGLGAVFLGFLGTAGSTMGAASMTLTVQARQLLGSAGSAGSGSAGSGSAGSGSAGSTVWGIKQLQARVLAIERYLKDQQLLGMWGCSGKLICCTNVYWNSSWSNKTYNEIWDNMTWMQWDREIDNYTDTIYKLLEVSQKQQESNEKDLLALDSWNNLWNWFDISKWLWYIKIFIMIVGGLIGLRIIFAVLSLVNRVRQGISPLSFQTLTPNPRELDRLGGIEEEGGEQDRDRSIRLVSGFFSLAWNDLRSLCLFCYHRLRDFILIAGRAVELLGRSSLQGLQRGWEILKYLGSLVQYWGLELKKSAINLFDTIAIAVAEGTDRIIEFLQRIVRAILHIPRRIRQGFEAALQ

SEQ ID NO: 271 - protein, 840 aa, synthetic construct
MGWSCIILFLVATATGVHALWVTVYYGVPVWREAKTTLFCASDAKSYEKEVHNIWATHACVPTDPNPQELVLKNVTENFNMWKNDMVDQMHEDIISLWDQSLKPCVKLTPLCVTLHCSTYNNTHNISKEIKNCSFNATTELRNKRRKEYALFYRLDIVPLNKNGRQYRLINCNTSVCTQVCPKLTFDPIPIHYCAPAGYAILKCNNKTFNGTGPCNNVSTVQCTHGIKPVLSTQLLLNGSLAEEEIIIRSENLTDNVKTIIVHLNESVEINCTRPNNNTRKSIRIGPGQTFYATGDIIGDIRQAHCNISEIKWNKTLQRVSEKLREHFNKTIIFNQSSGGDLEITTHSFNCGGEFFYCNTSDLFFNKTFNETYSTGSNSTNSNITLPCRIKQIINMWQEVGRCMYASPIAGEITCKSNITGLLLTRDGGGNNSTEETFRPGGGNMRDNWRSELYKYKVVEVKPLGIAPTECRRRVVQGGGGSGGGGSAVVGLGAVFLGFLGTAGSTMGAASMTLTVQARQLLGSAGSAGSGSAGSGSAGSGSAGSTVWGIKQLQARVLAIERYLKDQQLLGMWGCSGKLICCTNVYWNSSWSNKTYNEIWDNMTWMQWDREIDNYTDTIYKLLEVSQKQQESNEKDLLALDSWNNLWNWFDISKWLWYIKIFIMIVGGLIGLRIIFAVLSLVNRVRQGISPLSFQTLTPNPRELDRLGGIEEEGGEQDRDRSIRLVSGFFSLAWNDLRSLCLFCYHRLRDFILIAGRAVELLGRSSLQGLQRGWEILKYLGSLVQYWGLELKKSAINLFDTIAIAVAEGTDRIIEFLQRIVRAILHIPRRIRQGFEAAAA

SEQ ID NO: 272 - protein, 840 aa, synthetic construct
MGWSCIILFLVATATGVHALWVTVYYGVPVWREAKTTLFCASDAKSYEKEVHNIWATHACVPTDPNPQELVLKNVTENFNMWKNDMVDQMHEDIISLWDQSLKPCVKLTPLCVTLHCSTYNNTHNISKEIKNCSFNATTELRNKRRKEYALFYRLDIVPLNKNGRQYRLINCNTSVCTQVCPKLTFDPIPIHYCAPAGYAILKCNNKTFNGTGPCNNVSTVQCTHGIKPVLSTQLLLNGSLAEEEIIIRSENLTDNVKTIIVHLNESVEINCTRPNNNMRKSIRIGPGQTFYALGDIIGDIRQPHCNISEIKWNKTLQRVSEKLREHFNKTIIFNQSSGGDLEITTHSFNCGGEFFYCNTSDLFFNKTFNETYSTGSNSTNSNITLPCRIKQIINMWQEVGRCMYAPPIAGNITCKSNITGLLLTRDGGGNNSTEETFRPGGGNMRDNWRSELYKYKVVEVKPLGIAPTECRRRVVQGGGGSGGGGSAVVGLGAVFLGFLGTAGSTMGAASMTLTVQARQLLGSAGSAGSGSAGSGSAGSGSAGSTVWGFKQLQARVLAIERYLEVQQLLGMWGCSGKLICCTNVPWNSSWSNKTYNEIWDNMTWMQWDREIGNYTDTIYKLLEVSQFQQEINEKDLLALDSWNNLWNWFDISKWLWYIKIFIMIVGGLIGLRIIFAVLSLVNRVRQGISPLSFQTLTPNPRELDRLGGIEEEGGEQDRDRSIRLVSGFFSLAWNDLRSLCLFCYHRLRDFILIAGRAVELLGRSSLQGLQRGWEILKYLGSLVQYWGLELKKSAINLFDTIAIAVAEGTDRIIEFLQRIVRAILHIPRRIRQGFEAAAA

SEQ ID NO: 273 - protein, 840 aa, synthetic construct
MGWSCIILFLVATATGVHALWVTVYYGVPVWREAKTTLFCASDAKSYEKEVANIWATHACVPTDPNPQELVLKNVTENFNMWKNDMVDQMHEDIISLWDQSLKPCVKLTPLCVTLHCSTYNNTHNISKEIKNCSFNATTELRNKRRKEYALFYRLDIVPLNKNGRQYRLINCNTSVCTQVCPKLTFDPIPIHYCAPAGYAILKCNNKTFNGTGPCNNVSTVQCTHGIKPVLSTQLLLNGSLAEEEIIIRSENLTDNVKTIIVHLNESVEINCTRPNNNTRKSIRIGPGQWFYATGDIIGDIRQAHCNISEIKWNKTLQRVSEKLREHFNKTIIFNQSSGGDLEITTHSFNCGGEFFYCNTSDLFFNKTFNETYSTGSNSTNSNITLPCRIKQIINMWQEVGRCMYASPIAGEITCKSNITGLLLTRDGGGNNSTEETFRPGGGNMRDNWRSELYKYKVVEVKPLGIAPTECRRRVVQGGGGSGGGGSAVVGLGAVFLGFLGTAGSTMGAASMTLTVQARQLLGSAGSAGSGSAGSGSAGSGSAGSTVWGIKQLQARVLAIERYLKDQQLLGMWGCSGKLICCTNVYWNSSWSNKTYNEIWDNMTWMQWDREIDNYTDTIYKLLEVSQKQQEKNEQDLLALDSWNNLWNWFDISKWLWYIKIFIMIVGGLIGLRIIFAVLSLVNRVRQGISPLSFQTLTPNPRELDRLGGIEEEGGEQDRDRSIRLVSGFFSLAWNDLRSLCLFCYHRLRDFILIAGRAVELLGRSSLQGLQRGWEILKYLGSLVQYWGLELKKSAINLFDTIAIAVAEGTDRIIEFLQRIVRAILHIPRRIRQGFEAAAA

SEQ ID NO: 274 - protein, 840 aa, synthetic construct
MGWSCIILFLVATATGVHALWVTVYYGVPVWREAKTTLFCASDAKSYEKEVANIWATHACVPTDPNPQELVLKNVTENFNMWKNDMVDQMHEDIISLWDQSLKPCVKLTPLCVTLHCSTYNNTHNISKEIKNCSFNATTELRNKRRKEYALFYRLDIVPLNKNGRQYRLINCNTSVCTQVCPKLTFDPIPIHYCAPAGYAILKCNNKTFNGTGPCNNVSTVQCTHGIKPVLSTQLLLNGSLAEEEIIIRSENLTDNVKTIIVHLNESVEINCTRPNNMTRKSIRIGPGQWFYALGDIIGDIRQPHCNISEIKWNKTLQRVSEKLREHFNKTIIFNQSSGGDLEITTHSFNCGGEFFYCNTSDLFFNKTFNETYSTGSNSTNSNITLPCRIKQIINMWQEVGRCMYAPPIAGNITCKSNITGLLLTRDGGGNNSTEETFRPGGGNMRDNWRSELYKYKVVEVKPLGIAPTECRRRVVQGGGGSGGGGSAVVGLGAVFLGFLGTAGSTMGAASMTLTVQARQLLGSAGSAGSGSAGSGSAGSGSAGSTVWGFKQLQARVLAIERYLEVQQLLGMWGCSGKLICCTNVPWNSSWSNKTYNEIWDNMTWMQWDREIGNYTDTIYKLLEVSQFQQEKNEQDLLALDSWNNLWNWFDISKWLWYIKIFIMIVGGLIGLRIIFAVLSLVNRVRQGISPLSFQTLTPNPRELDRLGGIEEEGGEQDRDRSIRLVSGFFSLAWNDLRSLCLFCYHRLRDFILIAGRAVELLGRSSLQGLQRGWEILKYLGSLVQYWGLELKKSAINLFDTIAIAVAEGTDRIIEFLQRIVRAILHIPRRIRQGFEAAAA

SEQ ID NO: 275 - protein, 689 aa, synthetic construct
MGWSCIILFLVATATGVHALWVTVYYGVPVWREAKTTLFCASDAKSYEKEVHNIWATHACVPTDPNPQELVLKNVTENFNMWKNDMVDQMHEDIISLWDQSLKPCVKLTPLCVTLHCSTYNNTHNISKEIKNCSFNATTELRNKRRKEYALFYRLDIVPLNKNGRQYRLINCNTSVITQVCPKLTFDPIPIHYCAPAGYAILKCNNKTFNGTGPCNNVSTVQCTHGIKPVLSTQLLLNGSLAEEEIIIRSENLTDNVKTIIVHLNESVEINCTRPNNNTRKSIRIGPGQTFYATGDIIGDIRQAHCNISEIKWNKTLQRVSEKLREHFNKTIIFNQSSGGDLEITTHSFNCGGEFFYCNTSDLFFNKTFNETYSTGSNSTNSNITLPCRIKQIINMWQEVGRAMYASPIAGEITCKSNITGLLLTRDGGGNNSTEETFRPGGGNMRDNWRSELYKYKVVEVKPLGIAPTECRRRVVQGGGGSGGGGSAVVGLGAVFLGFLGTAGSTMGAASMTLTVQARQLLGSAGSAGSGSAGSGSAGSGSAGSTVWGIKQLQARVLAIERYLKDQQLLGMWGCSGKLICCTNVYWNSSWSNKTYNEIWDNMTWMQWDREIDNYTDTIYKLLEVSQKQQESNEKDLLALDSWNNLWNWFDISKWLWYIKIFIMIVGGLIGLRIIFAVLSLVNRVRQGI

SEQ ID NO: 276 - protein, 689 aa, synthetic construct
MGWSCIILFLVATATGVHALWVTVYYGVPVWREAKTTLFCASDAKSYEKEVHNIWATHACVPTDPNPQELVLKNVTENFNMWKNDMVDQMHEDIISLWDQSLKPCVKLTPLCVTLHCSTYNNTHNISKEIKNCSFNATTELRNKRRKEYALFYRLDIVPLNKNGRQYRLINCNTSVCTQVCPKLTFDPIPIHYCAPAGYAILKCNNKTFNGTGPCNNVSTVQCTHGIKPVLSTQLLLNGSLAEEEIIIRSENLTDNVKTIIVHLNESVEINCTRPNNNTRKSIRIGPGQTFYATGDIIGDIRQAHCNISEIKWNKTLQRVSEKLREHFNKTIIFNQSSGGDLEITTHSFNCGGEFFYCNTSDLFFNKTFNETYSTGSNSTNSNITLPCRIKQIINMWQEVGRCMYASPIAGEITCKSNITGLLLTRDGGGNNSTEETFRPGGGNMRDNWRSELYKYKVVEVKPLGIAPTECRRRVVQGGGGSGGGGSAVVGLGAVFLGFLGTAGSTMGAASMTLTVQARQLLGSAGSAGSGSAGSGSAGSGSAGSTVWGIKQLQARVLAIERYLKDQQLLGMWGCSGKLICCTNVYWNSSWSNKTYNEIWDNMTWMQWDREIDNYTDTIYKLLEVSQKQQESNEKDLLALDSWNNLWNWFDISKWLWYIKIFIMIVGGLIGLRIIFAVLSLVNRVRQGI

SEQ ID NO: 277 - protein, 689 aa, synthetic construct
MGWSCIILFLVATATGVHALWVTVYYGVPVWREAKTTLFCASDAKSYEKEVHNIWATHACVPTDPNPQELVLKNVTENFNMWKNDMVDQMHEDIISLWDQSLKPCVKLTPLCVTLHCSTYNNTHNISKEIKNCSFNATTELRNKRRKEYALFYRLDIVPLNKNGRQYRLINCNTSVCTQVCPKLTFDPIPIHYCAPAGYAILKCNNKTFNGTGPCNNVSTVQCTHGIKPVLSTQLLLNGSLAEEEIIIRSENLTDNVKTIIVHLNESVEINCTRPNNNMRKSIRIGPGQTFYALGDIIGDIRQPHCNISEIKWNKTLQRVSEKLREHFNKTIIFNQSSGGDLEITTHSFNCGGEFFYCNTSDLFFNKTFNETYSTGSNSTNSNITLPCRIKQIINMWQEVGRCMYAPPIAGNITCKSNITGLLLTRDGGGNNSTEETFRPGGGNMRDNWRSELYKYKVVEVKPLGIAPTECRRRVVQGGGGSGGGGSAVVGLGAVFLGFLGTAGSTMGAASMTLTVQARQLLGSAGSAGSGSAGSGSAGSGSAGSTVWGFKQLQARVLAIERYLEVQQLLGMWGCSGKLICCTNVPWNSSWSNKTYNEIWDNMTWMQWDREIGNYTDTIYKLLEVSQFQQEINEKDLLALDSWNNLWNWFDISKWLWYIKIFIMIVGGLIGLRIIFAVLSLVNRVRQGI

SEQ ID NO: 278 - protein, 689 aa, synthetic construct
MGWSCIILFLVATATGVHALWVTVYYGVPVWREAKTTLFCASDAKSYEKEVANIWATHACVPTDPNPQELVLKNVTENFNMWKNDMVDQMHEDIISLWDQSLKPCVKLTPLCVTLHCSTYNNTHNISKEIKNCSFNATTELRNKRRKEYALFYRLDIVPLNKNGRQYRLINCNTSVCTQVCPKLTFDPIPIHYCAPAGYAILKCNNKTFNGTGPCNNVSTVQCTHGIKPVLSTQLLLNGSLAEEEIIIRSENLTDNVKTIIVHLNESVEINCTRPNNNTRKSIRIGPGQWFYATGDIIGDIRQAHCNISEIKWNKTLQRVSEKLREHFNKTIIFNQSSGGDLEITTHSFNCGGEFFYCNTSDLFFNKTFNETYSTGSNSTNSNITLPCRIKQIINMWQEVGRCMYASPIAGEITCKSNITGLLLTRDGGGNNSTEETFRPGGGNMRDNWRSELYKYKVVEVKPLGIAPTECRRRVVQGGGGSGGGGSAVVGLGAVFLGFLGTAGSTMGAASMTLTVQARQLLGSAGSAGSGSAGSGSAGSGSAGSTVWGIKQLQARVLAIERYLKDQQLLGMWGCSGKLICCTNVYWNSSWSNKTYNEIWDNMTWMQWDREIDNYTDTIYKLLEVSQKQQEKNEQDLLALDSWNNLWNWFDISKWLWYIKIFIMIVGGLIGLRIIFAVLSLVNRVRQGI

SEQ ID NO: 279 - protein, 689 aa, synthetic construct
MGWSCIILFLVATATGVHALWVTVYYGVPVWREAKTTLFCASDAKSYEKEVANIWATHACVPTDPNPQELVLKNVTENFNMWKNDMVDQMHEDIISLWDQSLKPCVKLTPLCVTLHCSTYNNTHNISKEIKNCSFNATTELRNKRRKEYALFYRLDIVPLNKNGRQYRLINCNTSVCTQVCPKLTFDPIPIHYCAPAGYAILKCNNKTFNGTGPCNNVSTVQCTHGIKPVLSTQLLLNGSLAEEEIIIRSENLTDNVKTIIVHLNESVEINCTRPNNMTRKSIRIGPGQWFYALGDIIGDIRQPHCNISEIKWNKTLQRVSEKLREHFNKTIIFNQSSGGDLEITTHSFNCGGEFFYCNTSDLFFNKTFNETYSTGSNSTNSNITLPCRIKQIINMWQEVGRCMYAPPIAGNITCKSNITGLLLTRDGGGNNSTEETFRPGGGNMRDNWRSELYKYKVVEVKPLGIAPTECRRRVVQGGGGSGGGGSAVVGLGAVFLGFLGTAGSTMGAASMTLTVQARQLLGSAGSAGSGSAGSGSAGSGSAGSTVWGFKQLQARVLAIERYLEVQQLLGMWGCSGKLICCTNVPWNSSWSNKTYNEIWDNMTWMQWDREIGNYTDTIYKLLEVSQFQQEKNEQDLLALDSWNNLWNWFDISKWLWYIKIFIMIVGGLIGLRIIFAVLSLVNRVRQGI

SEQ ID NO: 280 - protein, 732 aa, synthetic construct
MGWSCIILFLVATATGVHALWVTVYYGVPVWREAKTTLFCASDAKSYEKEVHNIWATHACVPTDPNPQELVLKNVTENFNMWKNDMVDQMHEDIISLWDQSLKPCVKLTPLCVTLHCSTYNNTHNISKEIKNCSFNATTELRNKRRKEYALFYRLDIVPLNKNGRQYRLINCNTSVITQVCPKLTFDPIPIHYCAPAGYAILKCNNKTFNGTGPCNNVSTVQCTHGIKPVLSTQLLLNGSLAEEEIIIRSENLTDNVKTIIVHLNESVEINCTRPNNNTRKSIRIGPGQTFYATGDIIGDIRQAHCNISEIKWNKTLQRVSEKLREHFNKTIIFNQSSGGDLEITTHSFNCGGEFFYCNTSDLFFNKTFNETYSTGSNSTNSNITLPCRIKQIINMWQEVGRAMYASPIAGEITCKSNITGLLLTRDGGGNNSTEETFRPGGGNMRDNWRSELYKYKVVEVKPLGIAPTECRRRVVQGGGGSGGGGSAVVGLGAVFLGFLGTAGSTMGAASMTLTVQARQLLGSAGSAGSGSAGSGSAGSGSAGSTVWGIKQLQARVLAIERYLKDQQLLGMWGCSGKLICCTNVYWNSSWSNKTYNEIWDNMTWMQWDREIDNYTDTIYKLLEVSQKQQESNEKDLLALDSWNNLWNWFDISKWLWYIKIFIMIVGGLIGLRIIFAVLSLVNRVRQGISPLSFQTLTPNPRELDRLGGIEEEGGEQDRDRSIRLVSGFFSL

SEQ ID NO: 281 - protein, 732 aa, synthetic construct
MGWSCIILFLVATATGVHALWVTVYYGVPVWREAKTTLFCASDAKSYEKEVHNIWATHACVPTDPNPQELVLKNVTENFNMWKNDMVDQMHEDIISLWDQSLKPCVKLTPLCVTLHCSTYNNTHNISKEIKNCSFNATTELRNKRRKEYALFYRLDIVPLNKNGRQYRLINCNTSVCTQVCPKLTFDPIPIHYCAPAGYAILKCNNKTFNGTGPCNNVSTVQCTHGIKPVLSTQLLLNGSLAEEEIIIRSENLTDNVKTIIVHLNESVEINCTRPNNNTRKSIRIGPGQTFYATGDIIGDIRQAHCNISEIKWNKTLQRVSEKLREHFNKTIIFNQSSGGDLEITTHSFNCGGEFFYCNTSDLFFNKTFNETYSTGSNSTNSNITLPCRIKQIINMWQEVGRCMYASPIAGEITCKSNITGLLLTRDGGGNNSTEETFRPGGGNMRDNWRSELYKYKVVEVKPLGIAPTECRRRVVQGGGGSGGGGSAVVGLGAVFLGFLGTAGSTMGAASMTLTVQARQLLGSAGSAGSGSAGSGSAGSGSAGSTVWGIKQLQARVLAIERYLKDQQLLGMWGCSGKLICCTNVYWNSSWSNKTYNEIWDNMTWMQWDREIDNYTDTIYKLLEVSQKQQESNEKDLLALDSWNNLWNWFDISKWLWYIKIFIMIVGGLIGLRIIFAVLSLVNRVRQGISPLSFQTLTPNPRELDRLGGIEEEGGEQDRDRSIRLVSGFFSL

SEQ ID NO: 282 - protein, 732 aa, synthetic construct
MGWSCIILFLVATATGVHALWVTVYYGVPVWREAKTTLFCASDAKSYEKEVHNIWATHACVPTDPNPQELVLKNVTENFNMWKNDMVDQMHEDIISLWDQSLKPCVKLTPLCVTLHCSTYNNTHNISKEIKNCSFNATTELRNKRRKEYALFYRLDIVPLNKNGRQYRLINCNTSVCTQVCPKLTFDPIPIHYCAPAGYAILKCNNKTFNGTGPCNNVSTVQCTHGIKPVLSTQLLLNGSLAEEEIIIRSENLTDNVKTIIVHLNESVEINCTRPNNNMRKSIRIGPGQTFYALGDIIGDIRQPHCNISEIKWNKTLQRVSEKLREHFNKTIIFNQSSGGDLEITTHSFNCGGEFFYCNTSDLFFNKTFNETYSTGSNSTNSNITLPCRIKQIINMWQEVGRCMYAPPIAGNITCKSNITGLLLTRDGGGNNSTEETFRPGGGNMRDNWRSELYKYKVVEVKPLGIAPTECRRRVVQGGGGSGGGGSAVVGLGAVFLGFLGTAGSTMGAASMTLTVQARQLLGSAGSAGSGSAGSGSAGSGSAGSTVWGFKQLQARVLAIERYLEVQQLLGMWGCSGKLICCTNVPWNSSWSNKTYNEIWDNMTWMQWDREIGNYTDTIYKLLEVSQFQQEINEKDLLALDSWNNLWNWFDISKWLWYIKIFIMIVGGLIGLRIIFAVLSLVNRVRQGISPLSFQTLTPNPRELDRLGGIEEEGGEQDRDRSIRLVSGFFSL

SEQ ID NO: 283 - protein, 732 aa, synthetic construct
MGWSCIILFLVATATGVHALWVTVYYGVPVWREAKTTLFCASDAKSYEKEVANIWATHACVPTDPNPQELVLKNVTENFNMWKNDMVDQMHEDIISLWDQSLKPCVKLTPLCVTLHCSTYNNTHNISKEIKNCSFNATTELRNKRRKEYALFYRLDIVPLNKNGRQYRLINCNTSVCTQVCPKLTFDPIPIHYCAPAGYAILKCNNKTFNGTGPCNNVSTVQCTHGIKPVLSTQLLLNGSLAEEEIIIRSENLTDNVKTIIVHLNESVEINCTRPNNNTRKSIRIGPGQWFYATGDIIGDIRQAHCNISEIKWNKTLQRVSEKLREHFNKTIIFNQSSGGDLEITTHSFNCGGEFFYCNTSDLFFNKTFNETYSTGSNSTNSNITLPCRIKQIINMWQEVGRCMYASPIAGEITCKSNITGLLLTRDGGGNNSTEETFRPGGGNMRDNWRSELYKYKVVEVKPLGIAPTECRRRVVQGGGGSGGGGSAVVGLGAVFLGFLGTAGSTMGAASMTLTVQARQLLGSAGSAGSGSAGSGSAGSGSAGSTVWGIKQLQARVLAIERYLKDQQLLGMWGCSGKLICCTNVYWNSSWSNKTYNEIWDNMTWMQWDREIDNYTDTIYKLLEVSQKQQEKNEQDLLALDSWNNLWNWFDISKWLWYIKIFIMIVGGLIGLRIIFAVLSLVNRVRQGISPLSFQTLTPNPRELDRLGGIEEEGGEQDRDRSIRLVSGFFSL

SEQ ID NO: 284 - protein, 732 aa, synthetic construct
MGWSCIILFLVATATGVHALWVTVYYGVPVWREAKTTLFCASDAKSYEKEVANIWATHACVPTDPNPQELVLKNVTENFNMWKNDMVDQMHEDIISLWDQSLKPCVKLTPLCVTLHCSTYNNTHNISKEIKNCSFNATTELRNKRRKEYALFYRLDIVPLNKNGRQYRLINCNTSVCTQVCPKLTFDPIPIHYCAPAGYAILKCNNKTFNGTGPCNNVSTVQCTHGIKPVLSTQLLLNGSLAEEEIIIRSENLTDNVKTIIVHLNESVEINCTRPNNMTRKSIRIGPGQWFYALGDIIGDIRQPHCNISEIKWNKTLQRVSEKLREHFNKTIIFNQSSGGDLEITTHSFNCGGEFFYCNTSDLFFNKTFNETYSTGSNSTNSNITLPCRIKQIINMWQEVGRCMYAPPIAGNITCKSNITGLLLTRDGGGNNSTEETFRPGGGNMRDNWRSELYKYKVVEVKPLGIAPTECRRRVVQGGGGSGGGGSAVVGLGAVFLGFLGTAGSTMGAASMTLTVQARQLLGSAGSAGSGSAGSGSAGSGSAGSTVWGFKQLQARVLAIERYLEVQQLLGMWGCSGKLICCTNVPWNSSWSNKTYNEIWDNMTWMQWDREIGNYTDTIYKLLEVSQFQQEKNEQDLLALDSWNNLWNWFDISKWLWYIKIFIMIVGGLIGLRIIFAVLSLVNRVRQGISPLSFQTLTPNPRELDRLGGIEEEGGEQDRDRSIRLVSGFFSL

SEQ ID NO: 285 - protein, 727 aa, synthetic construct
MGWSCIILFLVATATGVHALWVTVYYGVPVWREAKTTLFCASDAKSYEKEVHNIWATHACVPTDPNPQELVLKNVTENFNMWKNDMVDQMHEDIISLWDQSLKPCVKLTPLCVTLHCSTYNNTHNISKEIKNCSFNATTELRNKRRKEYALFYRLDIVPLNKNGRQYRLINCNTSVITQVCPKLTFDPIPIHYCAPAGYAILKCNNKTFNGTGPCNNVSTVQCTHGIKPVLSTQLLLNGSLAEEEIIIRSENLTDNVKTIIVHLNESVEINCTRPNNNTRKSIRIGPGQTFYATGDIIGDIRQAHCNISEIKWNKTLQRVSEKLREHFNKTIIFNQSSGGDLEITTHSFNCGGEFFYCNTSDLFFNKTFNETYSTGSNSTNSNITLPCRIKQIINMWQEVGRAMYASPIAGEITCKSNITGLLLTRDGGGNNSTEETFRPGGGNMRDNWRSELYKYKVVEVKPLGIAPTECRRRVVQGGGGSGGGGSAVVGLGAVFLGFLGTAGSTMGAASMTLTVQARQLLGSAGSAGSGSAGSGSAGSGSAGSTVWGIKQLQARVLAIERYLKDQQLLGMWGCSGKLICCTNVYWNSSWSNKTYNEIWDNMTWMQWDREIDNYTDTIYKLLEVSQKQQESNEKDLLALDSWNNLWNWFDISKWLWYIKIFIMIVGGLIGLRIIFAVLSLVNRVRQGISPLSFQTLTPNPRELDRLGGIEEEGGEQDRDRSIRLVS

SEQ ID NO: 286 - protein, 727 aa, synthetic construct
MGWSCIILFLVATATGVHALWVTVYYGVPVWREAKTTLFCASDAKSYEKEVHNIWATHACVPTDPNPQELVLKNVTENFNMWKNDMVDQMHEDIISLWDQSLKPCVKLTPLCVTLHCSTYNNTHNISKEIKNCSFNATTELRNKRRKEYALFYRLDIVPLNKNGRQYRLINCNTSVCTQVCPKLTFDPIPIHYCAPAGYAILKCNNKTFNGTGPCNNVSTVQCTHGIKPVLSTQLLLNGSLAEEEIIIRSENLTDNVKTIIVHLNESVEINCTRPNNNTRKSIRIGPGQTFYATGDIIGDIRQAHCNISEIKWNKTLQRVSEKLREHFNKTIIFNQSSGGDLEITTHSFNCGGEFFYCNTSDLFFNKTFNETYSTGSNSTNSNITLPCRIKQIINMWQEVGRCMYASPIAGEITCKSNITGLLLTRDGGGNNSTEETFRPGGGNMRDNWRSELYKYKVVEVKPLGIAPTECRRRVVQGGGGSGGGGSAVVGLGAVFLGFLGTAGSTMGAASMTLTVQARQLLGSAGSAGSGSAGSGSAGSGSAGSTVWGIKQLQARVLAIERYLKDQQLLGMWGCSGKLICCTNVYWNSSWSNKTYNEIWDNMTWMQWDREIDNYTDTIYKLLEVSQKQQESNEKDLLALDSWNNLWNWFDISKWLWYIKIFIMIVGGLIGLRIIFAVLSLVNRVRQGISPLSFQTLTPNPRELDRLGGIEEEGGEQDRDRSIRLVS

SEQ ID NO: 287 - protein, 727 aa, synthetic construct
MGWSCIILFLVATATGVHALWVTVYYGVPVWREAKTTLFCASDAKSYEKEVHNIWATHACVPTDPNPQELVLKNVTENFNMWKNDMVDQMHEDIISLWDQSLKPCVKLTPLCVTLHCSTYNNTHNISKEIKNCSFNATTELRNKRRKEYALFYRLDIVPLNKNGRQYRLINCNTSVCTQVCPKLTFDPIPIHYCAPAGYAILKCNNKTFNGTGPCNNVSTVQCTHGIKPVLSTQLLLNGSLAEEEIIIRSENLTDNVKTIIVHLNESVEINCTRPNNNMRKSIRIGPGQTFYALGDIIGDIRQPHCNISEIKWNKTLQRVSEKLREHFNKTIIFNQSSGGDLEITTHSFNCGGEFFYCNTSDLFFNKTFNETYSTGSNSTNSNITLPCRIKQIINMWQEVGRCMYAPPIAGNITCKSNITGLLLTRDGGGNNSTEETFRPGGGNMRDNWRSELYKYKVVEVKPLGIAPTECRRRVVQGGGGSGGGGSAVVGLGAVFLGFLGTAGSTMGAASMTLTVQARQLLGSAGSAGSGSAGSGSAGSGSAGSTVWGFKQLQARVLAIERYLEVQQLLGMWGCSGKLICCTNVPWNSSWSNKTYNEIWDNMTWMQWDREIGNYTDTIYKLLEVSQFQQEINEKDLLALDSWNNLWNWFDISKWLWYIKIFIMIVGGLIGLRIIFAVLSLVNRVRQGISPLSFQTLTPNPRELDRLGGIEEEGGEQDRDRSIRLVS

SEQ ID NO: 288 - protein, 727 aa, synthetic construct
MGWSCIILFLVATATGVHALWVTVYYGVPVWREAKTTLFCASDAKSYEKEVANIWATHACVPTDPNPQELVLKNVTENFNMWKNDMVDQMHEDIISLWDQSLKPCVKLTPLCVTLHCSTYNNTHNISKEIKNCSFNATTELRNKRRKEYALFYRLDIVPLNKNGRQYRLINCNTSVCTQVCPKLTFDPIPIHYCAPAGYAILKCNNKTFNGTGPCNNVSTVQCTHGIKPVLSTQLLLNGSLAEEEIIIRSENLTDNVKTIIVHLNESVEINCTRPNNNTRKSIRIGPGQWFYATGDIIGDIRQAHCNISEIKWNKTLQRVSEKLREHFNKTIIFNQSSGGDLEITTHSFNCGGEFFYCNTSDLFFNKTFNETYSTGSNSTNSNITLPCRIKQIINMWQEVGRCMYASPIAGEITCKSNITGLLLTRDGGGNNSTEETFRPGGGNMRDNWRSELYKYKVVEVKPLGIAPTECRRRVVQGGGGSGGGGSAVVGLGAVFLGFLGTAGSTMGAASMTLTVQARQLLGSAGSAGSGSAGSGSAGSGSAGSTVWGIKQLQARVLAIERYLKDQQLLGMWGCSGKLICCTNVYWNSSWSNKTYNEIWDNMTWMQWDREIDNYTDTIYKLLEVSQKQQEKNEQDLLALDSWNNLWNWFDISKWLWYIKIFIMIVGGLIGLRIIFAVLSLVNRVRQGISPLSFQTLTPNPRELDRLGGIEEEGGEQDRDRSIRLVS

SEQ ID NO: 289 - protein, 727 aa, synthetic construct
MGWSCIILFLVATATGVHALWVTVYYGVPVWREAKTTLFCASDAKSYEKEVANIWATHACVPTDPNPQELVLKNVTENFNMWKNDMVDQMHEDIISLWDQSLKPCVKLTPLCVTLHCSTYNNTHNISKEIKNCSFNATTELRNKRRKEYALFYRLDIVPLNKNGRQYRLINCNTSVCTQVCPKLTFDPIPIHYCAPAGYAILKCNNKTFNGTGPCNNVSTVQCTHGIKPVLSTQLLLNGSLAEEEIIIRSENLTDNVKTIIVHLNESVEINCTRPNNMTRKSIRIGPGQWFYALGDIIGDIRQPHCNISEIKWNKTLQRVSEKLREHFNKTIIFNQSSGGDLEITTHSFNCGGEFFYCNTSDLFFNKTFNETYSTGSNSTNSNITLPCRIKQIINMWQEVGRCMYAPPIAGNITCKSNITGLLLTRDGGGNNSTEETFRPGGGNMRDNWRSELYKYKVVEVKPLGIAPTECRRRVVQGGGGSGGGGSAVVGLGAVFLGFLGTAGSTMGAASMTLTVQARQLLGSAGSAGSGSAGSGSAGSGSAGSTVWGFKQLQARVLAIERYLEVQQLLGMWGCSGKLICCTNVPWNSSWSNKTYNEIWDNMTWMQWDREIGNYTDTIYKLLEVSQFQQEKNEQDLLALDSWNNLWNWFDISKWLWYIKIFIMIVGGLIGLRIIFAVLSLVNRVRQGISPLSFQTLTPNPRELDRLGGIEEEGGEQDRDRSIRLVS

SEQ ID NO: 290 - protein, 851 aa, synthetic construct
MDSKGSSQKGSRLLLLLVVSNLLLPQGVLALWVTVYYGVPVWREAKTTLFCASDAKSYEKEVHNIWATHACVPTDPNPQELVLKNVTENFNMWKNDMVDQMHEDIISLWDQSLKPCVKLTPLCVTLHCSTYNNTHNISKEIKNCSFNATTELRNKRRKEYALFYRLDIVPLNKNGRQYRLINCNTSVITQVCPKLTFDPIPIHYCAPAGYAILKCNNKTFNGTGPCNNVSTVQCTHGIKPVLSTQLLLNGSLAEEEIIIRSENLTDNVKTIIVHLNESVEINCTRPNNNTRKSIRIGPGQTFYATGDIIGDIRQAHCNISEIKWNKTLQRVSEKLREHFNKTIIFNQSSGGDLEITTHSFNCGGEFFYCNTSDLFFNKTFNETYSTGSNSTNSNITLPCRIKQIINMWQEVGRAMYASPIAGEITCKSNITGLLLTRDGGGNNSTEETFRPGGGNMRDNWRSELYKYKVVEVKPLGIAPTECRRRVVQGGGGSGGGGSAVVGLGAVFLGFLGTAGSTMGAASMTLTVQARQLLGSAGSAGSGSAGSGSAGSGSAGSTVWGIKQLQARVLAIERYLKDQQLLGMWGCSGKLICCTNVYWNSSWSNKTYNEIWDNMTWMQWDREIDNYTDTIYKLLEVSQKQQESNEKDLLALDSWNNLWNWFDISKWLWYIKIFIMIVGGLIGLRIIFAVLSLVNRVRQGISPLSFQTLTPNPRELDRLGGIEEEGGEQDRDRSIRLVSGFFSLAWNDLRSLCLFCYHRLRDFILIAGRAVELLGRSSLQGLQRGWEILKYLGSLVQYWGLELKKSAINLFDTIAIAVAEGTDRIIEFLQRIVRAILHIPRRIRQGFEAALQ

SEQ ID NO: 291 - protein, 700 aa, synthetic construct
MDSKGSSQKGSRLLLLLVVSNLLLPQGVLALWVTVYYGVPVWREAKTTLFCASDAKSYEKEVHNIWATHACVPTDPNPQELVLKNVTENFNMWKNDMVDQMHEDIISLWDQSLKPCVKLTPLCVTLHCSTYNNTHNISKEIKNCSFNATTELRNKRRKEYALFYRLDIVPLNKNGRQYRLINCNTSVITQVCPKLTFDPIPIHYCAPAGYAILKCNNKTFNGTGPCNNVSTVQCTHGIKPVLSTQLLLNGSLAEEEIIIRSENLTDNVKTIIVHLNESVEINCTRPNNNTRKSIRIGPGQTFYATGDIIGDIRQAHCNISEIKWNKTLQRVSEKLREHFNKTIIFNQSSGGDLEITTHSFNCGGEFFYCNTSDLFFNKTFNETYSTGSNSTNSNITLPCRIKQIINMWQEVGRAMYASPIAGEITCKSNITGLLLTRDGGGNNSTEETFRPGGGNMRDNWRSELYKYKVVEVKPLGIAPTECRRRVVQGGGGSGGGGSAVVGLGAVFLGFLGTAGSTMGAASMTLTVQARQLLGSAGSAGSGSAGSGSAGSGSAGSTVWGIKQLQARVLAIERYLKDQQLLGMWGCSGKLICCTNVYWNSSWSNKTYNEIWDNMTWMQWDREIDNYTDTIYKLLEVSQKQQESNEKDLLALDSWNNLWNWFDISKWLWYIKIFIMIVGGLIGLRIIFAVLSLVNRVRQGI

SEQ ID NO: 292 - protein, 743 aa, synthetic construct
MDSKGSSQKGSRLLLLLVVSNLLLPQGVLALWVTVYYGVPVWREAKTTLFCASDAKSYEKEVHNIWATHACVPTDPNPQELVLKNVTENFNMWKNDMVDQMHEDIISLWDQSLKPCVKLTPLCVTLHCSTYNNTHNISKEIKNCSFNATTELRNKRRKEYALFYRLDIVPLNKNGRQYRLINCNTSVITQVCPKLTFDPIPIHYCAPAGYAILKCNNKTFNGTGPCNNVSTVQCTHGIKPVLSTQLLLNGSLAEEEIIIRSENLTDNVKTIIVHLNESVEINCTRPNNNTRKSIRIGPGQTFYATGDIIGDIRQAHCNISEIKWNKTLQRVSEKLREHFNKTIIFNQSSGGDLEITTHSFNCGGEFFYCNTSDLFFNKTFNETYSTGSNSTNSNITLPCRIKQIINMWQEVGRAMYASPIAGEITCKSNITGLLLTRDGGGNNSTEETFRPGGGNMRDNWRSELYKYKVVEVKPLGIAPTECRRRVVQGGGGSGGGGSAVVGLGAVFLGFLGTAGSTMGAASMTLTVQARQLLGSAGSAGSGSAGSGSAGSGSAGSTVWGIKQLQARVLAIERYLKDQQLLGMWGCSGKLICCTNVYWNSSWSNKTYNEIWDNMTWMQWDREIDNYTDTIYKLLEVSQKQQESNEKDLLALDSWNNLWNWFDISKWLWYIKIFIMIVGGLIGLRIIFAVLSLVNRVRQGISPLSFQTLTPNPRELDRLGGIEEEGGEQDRDRSIRLVSGFFSL

SEQ ID NO: 293 - protein, 738 aa, synthetic construct
MDSKGSSQKGSRLLLLLVVSNLLLPQGVLALWVTVYYGVPVWREAKTTLFCASDAKSYEKEVHNIWATHACVPTDPNPQELVLKNVTENFNMWKNDMVDQMHEDIISLWDQSLKPCVKLTPLCVTLHCSTYNNTHNISKEIKNCSFNATTELRNKRRKEYALFYRLDIVPLNKNGRQYRLINCNTSVITQVCPKLTFDPIPIHYCAPAGYAILKCNNKTFNGTGPCNNVSTVQCTHGIKPVLSTQLLLNGSLAEEEIIIRSENLTDNVKTIIVHLNESVEINCTRPNNNTRKSIRIGPGQTFYATGDIIGDIRQAHCNISEIKWNKTLQRVSEKLREHFNKTIIFNQSSGGDLEITTHSFNCGGEFFYCNTSDLFFNKTFNETYSTGSNSTNSNITLPCRIKQIINMWQEVGRAMYASPIAGEITCKSNITGLLLTRDGGGNNSTEETFRPGGGNMRDNWRSELYKYKVVEVKPLGIAPTECRRRVVQGGGGSGGGGSAVVGLGAVFLGFLGTAGSTMGAASMTLTVQARQLLGSAGSAGSGSAGSGSAGSGSAGSTVWGIKQLQARVLAIERYLKDQQLLGMWGCSGKLICCTNVYWNSSWSNKTYNEIWDNMTWMQWDREIDNYTDTIYKLLEVSQKQQESNEKDLLALDSWNNLWNWFDISKWLWYIKIFIMIVGGLIGLRIIFAVLSLVNRVRQGISPLSFQTLTPNPRELDRLGGIEEEGGEQDRDRSIRLVS

SEQ ID NO: 294 - protein, 851 aa, synthetic construct
MDSKGSSQKGSRLLLLLVVSNLLLPQGVLALWVTVYYGVPVWREAKTTLFCASDAKSYEKEVHNIWATHACVPTDPNPQELVLKNVTENFNMWKNDMVDQMHEDIISLWDQSLKPCVKLTPLCVTLHCSTYNNTHNISKEIKNCSFNATTELRNKRRKEYALFYRLDIVPLNKNGRQYRLINCNTSVCTQVCPKLTFDPIPIHYCAPAGYAILKCNNKTFNGTGPCNNVSTVQCTHGIKPVLSTQLLLNGSLAEEEIIIRSENLTDNVKTIIVHLNESVEINCTRPNNNTRKSIRIGPGQTFYATGDIIGDIRQAHCNISEIKWNKTLQRVSEKLREHFNKTIIFNQSSGGDLEITTHSFNCGGEFFYCNTSDLFFNKTFNETYSTGSNSTNSNITLPCRIKQIINMWQEVGRCMYASPIAGEITCKSNITGLLLTRDGGGNNSTEETFRPGGGNMRDNWRSELYKYKVVEVKPLGIAPTECRRRVVQGGGGSGGGGSAVVGLGAVFLGFLGTAGSTMGAASMTLTVQARQLLGSAGSAGSGSAGSGSAGSGSAGSTVWGIKQLQARVLAIERYLKDQQLLGMWGCSGKLICCTNVYWNSSWSNKTYNEIWDNMTWMQWDREIDNYTDTIYKLLEVSQKQQESNEKDLLALDSWNNLWNWFDISKWLWYIKIFIMIVGGLIGLRIIFAVLSLVNRVRQGISPLSFQTLTPNPRELDRLGGIEEEGGEQDRDRSIRLVSGFFSLAWNDLRSLCLFCYHRLRDFILIAGRAVELLGRSSLQGLQRGWEILKYLGSLVQYWGLELKKSAINLFDTIAIAVAEGTDRIIEFLQRIVRAILHIPRRIRQGFEAAAA

SEQ ID NO: 295 - protein, 851 aa, synthetic construct
MDSKGSSQKGSRLLLLLVVSNLLLPQGVLALWVTVYYGVPVWREAKTTLFCASDAKSYEKEVHNIWATHACVPTDPNPQELVLKNVTENFNMWKNDMVDQMHEDIISLWDQSLKPCVKLTPLCVTLHCSTYNNTHNISKEIKNCSFNATTELRNKRRKEYALFYRLDIVPLNKNGRQYRLINCNTSVCTQVCPKLTFDPIPIHYCAPAGYAILKCNNKTFNGTGPCNNVSTVQCTHGIKPVLSTQLLLNGSLAEEEIIIRSENLTDNVKTIIVHLNESVEINCTRPNNNMRKSIRIGPGQTFYALGDIIGDIRQPHCNISEIKWNKTLQRVSEKLREHFNKTIIFNQSSGGDLEITTHSFNCGGEFFYCNTSDLFFNKTFNETYSTGSNSTNSNITLPCRIKQIINMWQEVGRCMYAPPIAGNITCKSNITGLLLTRDGGGNNSTEETFRPGGGNMRDNWRSELYKYKVVEVKPLGIAPTECRRRVVQGGGGSGGGGSAVVGLGAVFLGFLGTAGSTMGAASMTLTVQARQLLGSAGSAGSGSAGSGSAGSGSAGSTVWGFKQLQARVLAIERYLEVQQLLGMWGCSGKLICCTNVPWNSSWSNKTYNEIWDNMTWMQWDREIGNYTDTIYKLLEVSQFQQEINEKDLLALDSWNNLWNWFDISKWLWYIKIFIMIVGGLIGLRIIFAVLSLVNRVRQGISPLSFQTLTPNPRELDRLGGIEEEGGEQDRDRSIRLVSGFFSLAWNDLRSLCLFCYHRLRDFILIAGRAVELLGRSSLQGLQRGWEILKYLGSLVQYWGLELKKSAINLFDTIAIAVAEGTDRIIEFLQRIVRAILHIPRRIRQGFEAAAA

SEQ ID NO: 296 - protein, 851 aa, synthetic construct
MDSKGSSQKGSRLLLLLVVSNLLLPQGVLALWVTVYYGVPVWREAKTTLFCASDAKSYEKEVANIWATHACVPTDPNPQELVLKNVTENFNMWKNDMVDQMHEDIISLWDQSLKPCVKLTPLCVTLHCSTYNNTHNISKEIKNCSFNATTELRNKRRKEYALFYRLDIVPLNKNGRQYRLINCNTSVCTQVCPKLTFDPIPIHYCAPAGYAILKCNNKTFNGTGPCNNVSTVQCTHGIKPVLSTQLLLNGSLAEEEIIIRSENLTDNVKTIIVHLNESVEINCTRPNNNTRKSIRIGPGQWFYATGDIIGDIRQAHCNISEIKWNKTLQRVSEKLREHFNKTIIFNQSSGGDLEITTHSFNCGGEFFYCNTSDLFFNKTFNETYSTGSNSTNSNITLPCRIKQIINMWQEVGRCMYASPIAGEITCKSNITGLLLTRDGGGNNSTEETFRPGGGNMRDNWRSELYKYKVVEVKPLGIAPTECRRRVVQGGGGSGGGGSAVVGLGAVFLGFLGTAGSTMGAASMTLTVQARQLLGSAGSAGSGSAGSGSAGSGSAGSTVWGIKQLQARVLAIERYLKDQQLLGMWGCSGKLICCTNVYWNSSWSNKTYNEIWDNMTWMQWDREIDNYTDTIYKLLEVSQKQQEKNEQDLLALDSWNNLWNWFDISKWLWYIKIFIMIVGGLIGLRIIFAVLSLVNRVRQGISPLSFQTLTPNPRELDRLGGIEEEGGEQDRDRSIRLVSGFFSLAWNDLRSLCLFCYHRLRDFILIAGRAVELLGRSSLQGLQRGWEILKYLGSLVQYWGLELKKSAINLFDTIAIAVAEGTDRIIEFLQRIVRAILHIPRRIRQGFEAAAA

SEQ ID NO: 297 - protein, 851 aa, synthetic construct
MDSKGSSQKGSRLLLLLVVSNLLLPQGVLALWVTVYYGVPVWREAKTTLFCASDAKSYEKEVANIWATHACVPTDPNPQELVLKNVTENFNMWKNDMVDQMHEDIISLWDQSLKPCVKLTPLCVTLHCSTYNNTHNISKEIKNCSFNATTELRNKRRKEYALFYRLDIVPLNKNGRQYRLINCNTSVCTQVCPKLTFDPIPIHYCAPAGYAILKCNNKTFNGTGPCNNVSTVQCTHGIKPVLSTQLLLNGSLAEEEIIIRSENLTDNVKTIIVHLNESVEINCTRPNNMTRKSIRIGPGQWFYALGDIIGDIRQPHCNISEIKWNKTLQRVSEKLREHFNKTIIFNQSSGGDLEITTHSFNCGGEFFYCNTSDLFFNKTFNETYSTGSNSTNSNITLPCRIKQIINMWQEVGRCMYAPPIAGNITCKSNITGLLLTRDGGGNNSTEETFRPGGGNMRDNWRSELYKYKVVEVKPLGIAPTECRRRVVQGGGGSGGGGSAVVGLGAVFLGFLGTAGSTMGAASMTLTVQARQLLGSAGSAGSGSAGSGSAGSGSAGSTVWGFKQLQARVLAIERYLEVQQLLGMWGCSGKLICCTNVPWNSSWSNKTYNEIWDNMTWMQWDREIGNYTDTIYKLLEVSQFQQEKNEQDLLALDSWNNLWNWFDISKWLWYIKIFIMIVGGLIGLRIIFAVLSLVNRVRQGISPLSFQTLTPNPRELDRLGGIEEEGGEQDRDRSIRLVSGFFSLAWNDLRSLCLFCYHRLRDFILIAGRAVELLGRSSLQGLQRGWEILKYLGSLVQYWGLELKKSAINLFDTIAIAVAEGTDRIIEFLQRIVRAILHIPRRIRQGFEAAAA

SEQ ID NO: 298 - protein, 700 aa, synthetic construct
MDSKGSSQKGSRLLLLLVVSNLLLPQGVLALWVTVYYGVPVWREAKTTLFCASDAKSYEKEVHNIWATHACVPTDPNPQELVLKNVTENFNMWKNDMVDQMHEDIISLWDQSLKPCVKLTPLCVTLHCSTYNNTHNISKEIKNCSFNATTELRNKRRKEYALFYRLDIVPLNKNGRQYRLINCNTSVCTQVCPKLTFDPIPIHYCAPAGYAILKCNNKTFNGTGPCNNVSTVQCTHGIKPVLSTQLLLNGSLAEEEIIIRSENLTDNVKTIIVHLNESVEINCTRPNNNTRKSIRIGPGQTFYATGDIIGDIRQAHCNISEIKWNKTLQRVSEKLREHFNKTIIFNQSSGGDLEITTHSFNCGGEFFYCNTSDLFFNKTFNETYSTGSNSTNSNITLPCRIKQIINMWQEVGRCMYASPIAGEITCKSNITGLLLTRDGGGNNSTEETFRPGGGNMRDNWRSELYKYKVVEVKPLGIAPTECRRRVVQGGGGSGGGGSAVVGLGAVFLGFLGTAGSTMGAASMTLTVQARQLLGSAGSAGSGSAGSGSAGSGSAGSTVWGIKQLQARVLAIERYLKDQQLLGMWGCSGKLICCTNVYWNSSWSNKTYNEIWDNMTWMQWDREIDNYTDTIYKLLEVSQKQQESNEKDLLALDSWNNLWNWFDISKWLWYIKIFIMIVGGLIGLRIIFAVLSLVNRVRQGI

SEQ ID NO: 299 - protein, 700 aa, synthetic construct
MDSKGSSQKGSRLLLLLVVSNLLLPQGVLALWVTVYYGVPVWREAKTTLFCASDAKSYEKEVHNIWATHACVPTDPNPQELVLKNVTENFNMWKNDMVDQMHEDIISLWDQSLKPCVKLTPLCVTLHCSTYNNTHNISKEIKNCSFNATTELRNKRRKEYALFYRLDIVPLNKNGRQYRLINCNTSVCTQVCPKLTFDPIPIHYCAPAGYAILKCNNKTFNGTGPCNNVSTVQCTHGIKPVLSTQLLLNGSLAEEEIIIRSENLTDNVKTIIVHLNESVEINCTRPNNNMRKSIRIGPGQTFYALGDIIGDIRQPHCNISEIKWNKTLQRVSEKLREHFNKTIIFNQSSGGDLEITTHSFNCGGEFFYCNTSDLFFNKTFNETYSTGSNSTNSNITLPCRIKQIINMWQEVGRCMYAPPIAGNITCKSNITGLLLTRDGGGNNSTEETFRPGGGNMRDNWRSELYKYKVVEVKPLGIAPTECRRRVVQGGGGSGGGGSAVVGLGAVFLGFLGTAGSTMGAASMTLTVQARQLLGSAGSAGSGSAGSGSAGSGSAGSTVWGFKQLQARVLAIERYLEVQQLLGMWGCSGKLICCTNVPWNSSWSNKTYNEIWDNMTWMQWDREIGNYTDTIYKLLEVSQFQQEINEKDLLALDSWNNLWNWFDISKWLWYIKIFIMIVGGLIGLRIIFAVLSLVNRVRQGI

SEQ ID NO: 300 - protein, 700 aa, synthetic construct
MDSKGSSQKGSRLLLLLVVSNLLLPQGVLALWVTVYYGVPVWREAKTTLFCASDAKSYEKEVANIWATHACVPTDPNPQELVLKNVTENFNMWKNDMVDQMHEDIISLWDQSLKPCVKLTPLCVTLHCSTYNNTHNISKEIKNCSFNATTELRNKRRKEYALFYRLDIVPLNKNGRQYRLINCNTSVCTQVCPKLTFDPIPIHYCAPAGYAILKCNNKTFNGTGPCNNVSTVQCTHGIKPVLSTQLLLNGSLAEEEIIIRSENLTDNVKTIIVHLNESVEINCTRPNNNTRKSIRIGPGQWFYATGDIIGDIRQAHCNISEIKWNKTLQRVSEKLREHFNKTIIFNQSSGGDLEITTHSFNCGGEFFYCNTSDLFFNKTFNETYSTGSNSTNSNITLPCRIKQIINMWQEVGRCMYASPIAGEITCKSNITGLLLTRDGGGNNSTEETFRPGGGNMRDNWRSELYKYKVVEVKPLGIAPTECRRRVVQGGGGSGGGGSAVVGLGAVFLGFLGTAGSTMGAASMTLTVQARQLLGSAGSAGSGSAGSGSAGSGSAGSTVWGIKQLQARVLAIERYLKDQQLLGMWGCSGKLICCTNVYWNSSWSNKTYNEIWDNMTWMQWDREIDNYTDTIYKLLEVSQKQQEKNEQDLLALDSWNNLWNWFDISKWLWYIKIFIMIVGGLIGLRIIFAVLSLVNRVRQGI

SEQ ID NO: 301 - protein, 700 aa, synthetic construct
MDSKGSSQKGSRLLLLLVVSNLLLPQGVLALWVTVYYGVPVWREAKTTLFCASDAKSYEKEVANIWATHACVPTDPNPQELVLKNVTENFNMWKNDMVDQMHEDIISLWDQSLKPCVKLTPLCVTLHCSTYNNTHNISKEIKNCSFNATTELRNKRRKEYALFYRLDIVPLNKNGRQYRLINCNTSVCTQVCPKLTFDPIPIHYCAPAGYAILKCNNKTFNGTGPCNNVSTVQCTHGIKPVLSTQLLLNGSLAEEEIIIRSENLTDNVKTIIVHLNESVEINCTRPNNMTRKSIRIGPGQWFYALGDIIGDIRQPHCNISEIKWNKTLQRVSEKLREHFNKTIIFNQSSGGDLEITTHSFNCGGEFFYCNTSDLFFNKTFNETYSTGSNSTNSNITLPCRIKQIINMWQEVGRCMYAPPIAGNITCKSNITGLLLTRDGGGNNSTEETFRPGGGNMRDNWRSELYKYKVVEVKPLGIAPTECRRRVVQGGGGSGGGGSAVVGLGAVFLGFLGTAGSTMGAASMTLTVQARQLLGSAGSAGSGSAGSGSAGSGSAGSTVWGFKQLQARVLAIERYLEVQQLLGMWGCSGKLICCTNVPWNSSWSNKTYNEIWDNMTWMQWDREIGNYTDTIYKLLEVSQFQQEKNEQDLLALDSWNNLWNWFDISKWLWYIKIFIMIVGGLIGLRIIFAVLSLVNRVRQGI

SEQ ID NO: 302 - protein, 743 aa, synthetic construct
MDSKGSSQKGSRLLLLLVVSNLLLPQGVLALWVTVYYGVPVWREAKTTLFCASDAKSYEKEVHNIWATHACVPTDPNPQELVLKNVTENFNMWKNDMVDQMHEDIISLWDQSLKPCVKLTPLCVTLHCSTYNNTHNISKEIKNCSFNATTELRNKRRKEYALFYRLDIVPLNKNGRQYRLINCNTSVCTQVCPKLTFDPIPIHYCAPAGYAILKCNNKTFNGTGPCNNVSTVQCTHGIKPVLSTQLLLNGSLAEEEIIIRSENLTDNVKTIIVHLNESVEINCTRPNNNTRKSIRIGPGQTFYATGDIIGDIRQAHCNISEIKWNKTLQRVSEKLREHFNKTIIFNQSSGGDLEITTHSFNCGGEFFYCNTSDLFFNKTFNETYSTGSNSTNSNITLPCRIKQIINMWQEVGRCMYASPIAGEITCKSNITGLLLTRDGGGNNSTEETFRPGGGNMRDNWRSELYKYKVVEVKPLGIAPTECRRRVVQGGGGSGGGGSAVVGLGAVFLGFLGTAGSTMGAASMTLTVQARQLLGSAGSAGSGSAGSGSAGSGSAGSTVWGIKQLQARVLAIERYLKDQQLLGMWGCSGKLICCTNVYWNSSWSNKTYNEIWDNMTWMQWDREIDNYTDTIYKLLEVSQKQQESNEKDLLALDSWNNLWNWFDISKWLWYIKIFIMIVGGLIGLRIIFAVLSLVNRVRQGISPLSFQTLTPNPRELDRLGGIEEEGGEQDRDRSIRLVSGFFSL

SEQ ID NO: 303 - protein, 743 aa, synthetic construct
MDSKGSSQKGSRLLLLLVVSNLLLPQGVLALWVTVYYGVPVWREAKTTLFCASDAKSYEKEVHNIWATHACVPTDPNPQELVLKNVTENFNMWKNDMVDQMHEDIISLWDQSLKPCVKLTPLCVTLHCSTYNNTHNISKEIKNCSFNATTELRNKRRKEYALFYRLDIVPLNKNGRQYRLINCNTSVCTQVCPKLTFDPIPIHYCAPAGYAILKCNNKTFNGTGPCNNVSTVQCTHGIKPVLSTQLLLNGSLAEEEIIIRSENLTDNVKTIIVHLNESVEINCTRPNNNMRKSIRIGPGQTFYALGDIIGDIRQPHCNISEIKWNKTLQRVSEKLREHFNKTIIFNQSSGGDLEITTHSFNCGGEFFYCNTSDLFFNKTFNETYSTGSNSTNSNITLPCRIKQIINMWQEVGRCMYAPPIAGNITCKSNITGLLLTRDGGGNNSTEETFRPGGGNMRDNWRSELYKYKVVEVKPLGIAPTECRRRVVQGGGGSGGGGSAVVGLGAVFLGFLGTAGSTMGAASMTLTVQARQLLGSAGSAGSGSAGSGSAGSGSAGSTVWGFKQLQARVLAIERYLEVQQLLGMWGCSGKLICCTNVPWNSSWSNKTYNEIWDNMTWMQWDREIGNYTDTIYKLLEVSQFQQEINEKDLLALDSWNNLWNWFDISKWLWYIKIFIMIVGGLIGLRIIFAVLSLVNRVRQGISPLSFQTLTPNPRELDRLGGIEEEGGEQDRDRSIRLVSGFFSL

SEQ ID NO: 304 - protein, 743 aa, synthetic construct
MDSKGSSQKGSRLLLLLVVSNLLLPQGVLALWVTVYYGVPVWREAKTTLFCASDAKSYEKEVANIWATHACVPTDPNPQELVLKNVTENFNMWKNDMVDQMHEDIISLWDQSLKPCVKLTPLCVTLHCSTYNNTHNISKEIKNCSFNATTELRNKRRKEYALFYRLDIVPLNKNGRQYRLINCNTSVCTQVCPKLTFDPIPIHYCAPAGYAILKCNNKTFNGTGPCNNVSTVQCTHGIKPVLSTQLLLNGSLAEEEIIIRSENLTDNVKTIIVHLNESVEINCTRPNNNTRKSIRIGPGQWFYATGDIIGDIRQAHCNISEIKWNKTLQRVSEKLREHFNKTIIFNQSSGGDLEITTHSFNCGGEFFYCNTSDLFFNKTFNETYSTGSNSTNSNITLPCRIKQIINMWQEVGRCMYASPIAGEITCKSNITGLLLTRDGGGNNSTEETFRPGGGNMRDNWRSELYKYKVVEVKPLGIAPTECRRRVVQGGGGSGGGGSAVVGLGAVFLGFLGTAGSTMGAASMTLTVQARQLLGSAGSAGSGSAGSGSAGSGSAGSTVWGIKQLQARVLAIERYLKDQQLLGMWGCSGKLICCTNVYWNSSWSNKTYNEIWDNMTWMQWDREIDNYTDTIYKLLEVSQKQQEKNEQDLLALDSWNNLWNWFDISKWLWYIKIFIMIVGGLIGLRIIFAVLSLVNRVRQGISPLSFQTLTPNPRELDRLGGIEEEGGEQDRDRSIRLVSGFFSL

SEQ ID NO: 305 - protein, 743 aa, synthetic construct
MDSKGSSQKGSRLLLLLVVSNLLLPQGVLALWVTVYYGVPVWREAKTTLFCASDAKSYEKEVANIWATHACVPTDPNPQELVLKNVTENFNMWKNDMVDQMHEDIISLWDQSLKPCVKLTPLCVTLHCSTYNNTHNISKEIKNCSFNATTELRNKRRKEYALFYRLDIVPLNKNGRQYRLINCNTSVCTQVCPKLTFDPIPIHYCAPAGYAILKCNNKTFNGTGPCNNVSTVQCTHGIKPVLSTQLLLNGSLAEEEIIIRSENLTDNVKTIIVHLNESVEINCTRPNNMTRKSIRIGPGQWFYALGDIIGDIRQPHCNISEIKWNKTLQRVSEKLREHFNKTIIFNQSSGGDLEITTHSFNCGGEFFYCNTSDLFFNKTFNETYSTGSNSTNSNITLPCRIKQIINMWQEVGRCMYAPPIAGNITCKSNITGLLLTRDGGGNNSTEETFRPGGGNMRDNWRSELYKYKVVEVKPLGIAPTECRRRVVQGGGGSGGGGSAVVGLGAVFLGFLGTAGSTMGAASMTLTVQARQLLGSAGSAGSGSAGSGSAGSGSAGSTVWGFKQLQARVLAIERYLEVQQLLGMWGCSGKLICCTNVPWNSSWSNKTYNEIWDNMTWMQWDREIGNYTDTIYKLLEVSQFQQEKNEQDLLALDSWNNLWNWFDISKWLWYIKIFIMIVGGLIGLRIIFAVLSLVNRVRQGISPLSFQTLTPNPRELDRLGGIEEEGGEQDRDRSIRLVSGFFSL

SEQ ID NO: 306 - protein, 738 aa, synthetic construct
MDSKGSSQKGSRLLLLLVVSNLLLPQGVLALWVTVYYGVPVWREAKTTLFCASDAKSYEKEVHNIWATHACVPTDPNPQELVLKNVTENFNMWKNDMVDQMHEDIISLWDQSLKPCVKLTPLCVTLHCSTYNNTHNISKEIKNCSFNATTELRNKRRKEYALFYRLDIVPLNKNGRQYRLINCNTSVCTQVCPKLTFDPIPIHYCAPAGYAILKCNNKTFNGTGPCNNVSTVQCTHGIKPVLSTQLLLNGSLAEEEIIIRSENLTDNVKTIIVHLNESVEINCTRPNNNTRKSIRIGPGQTFYATGDIIGDIRQAHCNISEIKWNKTLQRVSEKLREHFNKTIIFNQSSGGDLEITTHSFNCGGEFFYCNTSDLFFNKTFNETYSTGSNSTNSNITLPCRIKQIINMWQEVGRCMYASPIAGEITCKSNITGLLLTRDGGGNNSTEETFRPGGGNMRDNWRSELYKYKVVEVKPLGIAPTECRRRVVQGGGGSGGGGSAVVGLGAVFLGFLGTAGSTMGAASMTLTVQARQLLGSAGSAGSGSAGSGSAGSGSAGSTVWGIKQLQARVLAIERYLKDQQLLGMWGCSGKLICCTNVYWNSSWSNKTYNEIWDNMTWMQWDREIDNYTDTIYKLLEVSQKQQESNEKDLLALDSWNNLWNWFDISKWLWYIKIFIMIVGGLIGLRIIFAVLSLVNRVRQGISPLSFQTLTPNPRELDRLGGIEEEGGEQDRDRSIRLVS

SEQ ID NO: 307 - protein, 738 aa, synthetic construct
MDSKGSSQKGSRLLLLLVVSNLLLPQGVLALWVTVYYGVPVWREAKTTLFCASDAKSYEKEVHNIWATHACVPTDPNPQELVLKNVTENFNMWKNDMVDQMHEDIISLWDQSLKPCVKLTPLCVTLHCSTYNNTHNISKEIKNCSFNATTELRNKRRKEYALFYRLDIVPLNKNGRQYRLINCNTSVCTQVCPKLTFDPIPIHYCAPAGYAILKCNNKTFNGTGPCNNVSTVQCTHGIKPVLSTQLLLNGSLAEEEIIIRSENLTDNVKTIIVHLNESVEINCTRPNNNMRKSIRIGPGQTFYALGDIIGDIRQPHCNISEIKWNKTLQRVSEKLREHFNKTIIFNQSSGGDLEITTHSFNCGGEFFYCNTSDLFFNKTFNETYSTGSNSTNSNITLPCRIKQIINMWQEVGRCMYAPPIAGNITCKSNITGLLLTRDGGGNNSTEETFRPGGGNMRDNWRSELYKYKVVEVKPLGIAPTECRRRVVQGGGGSGGGGSAVVGLGAVFLGFLGTAGSTMGAASMTLTVQARQLLGSAGSAGSGSAGSGSAGSGSAGSTVWGFKQLQARVLAIERYLEVQQLLGMWGCSGKLICCTNVPWNSSWSNKTYNEIWDNMTWMQWDREIGNYTDTIYKLLEVSQFQQEINEKDLLALDSWNNLWNWFDISKWLWYIKIFIMIVGGLIGLRIIFAVLSLVNRVRQGISPLSFQTLTPNPRELDRLGGIEEEGGEQDRDRSIRLVS

SEQ ID NO: 308 - protein, 738 aa, synthetic construct
MDSKGSSQKGSRLLLLLVVSNLLLPQGVLALWVTVYYGVPVWREAKTTLFCASDAKSYEKEVANIWATHACVPTDPNPQELVLKNVTENFNMWKNDMVDQMHEDIISLWDQSLKPCVKLTPLCVTLHCSTYNNTHNISKEIKNCSFNATTELRNKRRKEYALFYRLDIVPLNKNGRQYRLINCNTSVCTQVCPKLTFDPIPIHYCAPAGYAILKCNNKTFNGTGPCNNVSTVQCTHGIKPVLSTQLLLNGSLAEEEIIIRSENLTDNVKTIIVHLNESVEINCTRPNNNTRKSIRIGPGQWFYATGDIIGDIRQAHCNISEIKWNKTLQRVSEKLREHFNKTIIFNQSSGGDLEITTHSFNCGGEFFYCNTSDLFFNKTFNETYSTGSNSTNSNITLPCRIKQIINMWQEVGRCMYASPIAGEITCKSNITGLLLTRDGGGNNSTEETFRPGGGNMRDNWRSELYKYKVVEVKPLGIAPTECRRRVVQGGGGSGGGGSAVVGLGAVFLGFLGTAGSTMGAASMTLTVQARQLLGSAGSAGSGSAGSGSAGSGSAGSTVWGIKQLQARVLAIERYLKDQQLLGMWGCSGKLICCTNVYWNSSWSNKTYNEIWDNMTWMQWDREIDNYTDTIYKLLEVSQKQQEKNEQDLLALDSWNNLWNWFDISKWLWYIKIFIMIVGGLIGLRIIFAVLSLVNRVRQGISPLSFQTLTPNPRELDRLGGIEEEGGEQDRDRSIRLVS

SEQ ID NO: 309 - protein, 738 aa, synthetic construct
MDSKGSSQKGSRLLLLLVVSNLLLPQGVLALWVTVYYGVPVWREAKTTLFCASDAKSYEKEVANIWATHACVPTDPNPQELVLKNVTENFNMWKNDMVDQMHEDIISLWDQSLKPCVKLTPLCVTLHCSTYNNTHNISKEIKNCSFNATTELRNKRRKEYALFYRLDIVPLNKNGRQYRLINCNTSVCTQVCPKLTFDPIPIHYCAPAGYAILKCNNKTFNGTGPCNNVSTVQCTHGIKPVLSTQLLLNGSLAEEEIIIRSENLTDNVKTIIVHLNESVEINCTRPNNMTRKSIRIGPGQWFYALGDIIGDIRQPHCNISEIKWNKTLQRVSEKLREHFNKTIIFNQSSGGDLEITTHSFNCGGEFFYCNTSDLFFNKTFNETYSTGSNSTNSNITLPCRIKQIINMWQEVGRCMYAPPIAGNITCKSNITGLLLTRDGGGNNSTEETFRPGGGNMRDNWRSELYKYKVVEVKPLGIAPTECRRRVVQGGGGSGGGGSAVVGLGAVFLGFLGTAGSTMGAASMTLTVQARQLLGSAGSAGSGSAGSGSAGSGSAGSTVWGFKQLQARVLAIERYLEVQQLLGMWGCSGKLICCTNVPWNSSWSNKTYNEIWDNMTWMQWDREIGNYTDTIYKLLEVSQFQQEKNEQDLLALDSWNNLWNWFDISKWLWYIKIFIMIVGGLIGLRIIFAVLSLVNRVRQGISPLSFQTLTPNPRELDRLGGIEEEGGEQDRDRSIRLVS

SEQ ID NO: 310 - protein, 851 aa, synthetic construct
MDSKGSSQKGSRLLLLLVVSNLLLPQGVLALWVTVYYGVPVWREAKTTLFCASDAKSYEKEVHNIWATHACVPTDPNPQELVLKNVTENFNMWKNDMVDQMHEDIISLWDQSLKPCVKLTPLCVTLHCSTYNNTHNISKEIKNCSFNATTELRDKRRKEYALFYRLDIVPLNKNGRQYRLINCNTSVCTQVCPKLTFDPIPIHYCAPAGYAILKCNNKTFNGTGPCNNVSTVQCTHGIKPVLSTQLLLNGSLAEEEIIIRSENLTDNVKTIIVHLNESVEINCTRPNNNMRKSIRIGPGQTFYALGDIIGDIRQPHCNISEIKWNKTLQRVSEKLREHFNKTIIFNQSSGGDLEITTHSFNCGGEFFYCNTSDLFFNKTFNETYSTGSNSTNSNITLPCRIKQIINMWQEVGRCMYAPPIAGNITCKSNITGLLLTRDGGGNNSTEETFRPGGGNMRDNWRSELYKYKVVEVKPLGIAPTECRRRVVQGGGGSGGGGSAVVGLGAVFLGFLGTAGSTMGAASMTLTVQARQLLGSAGSAGSGSAGSGSAGSGSAGSTVWGFKQLQARVLAIERYLEVQQLLGMWGCSGKLICCTNVPWNSSWSNKTYNEIWDNMTWMQWDREIGNYTDTIYKLLEVSQFQQEINEKDLLALDSWNNLWNWFDISKWLWYIKIFIMIVGGLIGLRIIFAVLSLVNRVRQGISPLSFQTLTPNPRELDRLGGIEEEGGEQDRDRSIRLVSGFFSLAWNDLRSLCLFCYHRLRDFILIAGRAVELLGRSSLQGLQRGWEILKYLGSLVQYWGLELKKSAINLFDTIAIAVAEGTDRIIEFLQRIVRAILHIPRRIRQGFEAAAA

SEQ ID NO: 311 - protein, 851 aa, synthetic construct
MDSKGSSQKGSRLLLLLVVSNLLLPQGVLALWVTVYYGVPVWREAKTTLFCASDAKSYEKEVANIWATHACVPTDPNPQELVLKNVTENFNMWKNDMVDQMHEDIISLWDQSLKPCVKLTPLCVTLHCSTYNNTHNISKEIKNCSFNATTELRDKRRKEYALFYRLDIVPLNKNGRQYRLINCNTSVCTQVCPKLTFDPIPIHYCAPAGYAILKCNNKTFNGTGPCNNVSTVQCTHGIKPVLSTQLLLNGSLAEEEIIIRSENLTDNVKTIIVHLNESVEINCTRPNNNTRKSIRIGPGQWFYATGDIIGDIRQAHCNISEIKWNKTLQRVSEKLREHFNKTIIFNQSSGGDLEITTHSFNCGGEFFYCNTSDLFFNKTFNETYSTGSNSTNSNITLPCRIKQIINMWQEVGRCMYASPIAGEITCKSNITGLLLTRDGGGNNSTEETFRPGGGNMRDNWRSELYKYKVVEVKPLGIAPTECRRRVVQGGGGSGGGGSAVVGLGAVFLGFLGTAGSTMGAASMTLTVQARQLLGSAGSAGSGSAGSGSAGSGSAGSTVWGIKQLQARVLAIERYLKDQQLLGMWGCSGKLICCTNVYWNSSWSNKTYNEIWDNMTWMQWDREIDNYTDTIYKLLEVSQKQQEKNEQDLLALDSWNNLWNWFDISKWLWYIKIFIMIVGGLIGLRIIFAVLSLVNRVRQGISPLSFQTLTPNPRELDRLGGIEEEGGEQDRDRSIRLVSGFFSLAWNDLRSLCLFCYHRLRDFILIAGRAVELLGRSSLQGLQRGWEILKYLGSLVQYWGLELKKSAINLFDTIAIAVAEGTDRIIEFLQRIVRAILHIPRRIRQGFEAAAA

SEQ ID NO: 312 - protein, 851 aa, synthetic construct
MDSKGSSQKGSRLLLLLVVSNLLLPQGVLALWVTVYYGVPVWREAKTTLFCASDAKSYEKEVANIWATHACVPTDPNPQELVLKNVTENFNMWKNDMVDQMHEDIISLWDQSLKPCVKLTPLCVTLHCSTYNNTHNISKEIKNCSFNATTELRDKRRKEYALFYRLDIVPLNKNGRQYRLINCNTSVCTQVCPKLTFDPIPIHYCAPAGYAILKCNNKTFNGTGPCNNVSTVQCTHGIKPVLSTQLLLNGSLAEEEIIIRSENLTDNVKTIIVHLNESVEINCTRPNNMTRKSIRIGPGQWFYALGDIIGDIRQPHCNISEIKWNKTLQRVSEKLREHFNKTIIFNQSSGGDLEITTHSFNCGGEFFYCNTSDLFFNKTFNETYSTGSNSTNSNITLPCRIKQIINMWQEVGRCMYAPPIAGNITCKSNITGLLLTRDGGGNNSTEETFRPGGGNMRDNWRSELYKYKVVEVKPLGIAPTECRRRVVQGGGGSGGGGSAVVGLGAVFLGFLGTAGSTMGAASMTLTVQARQLLGSAGSAGSGSAGSGSAGSGSAGSTVWGFKQLQARVLAIERYLEVQQLLGMWGCSGKLICCTNVPWNSSWSNKTYNEIWDNMTWMQWDREIGNYTDTIYKLLEVSQFQQEKNEQDLLALDSWNNLWNWFDISKWLWYIKIFIMIVGGLIGLRIIFAVLSLVNRVRQGISPLSFQTLTPNPRELDRLGGIEEEGGEQDRDRSIRLVSGFFSLAWNDLRSLCLFCYHRLRDFILIAGRAVELLGRSSLQGLQRGWEILKYLGSLVQYWGLELKKSAINLFDTIAIAVAEGTDRIIEFLQRIVRAILHIPRRIRQGFEAAAA

SEQ ID NO: 313 - protein, 700 aa, synthetic construct
MDSKGSSQKGSRLLLLLVVSNLLLPQGVLALWVTVYYGVPVWREAKTTLFCASDAKSYEKEVHNIWATHACVPTDPNPQELVLKNVTENFNMWKNDMVDQMHEDIISLWDQSLKPCVKLTPLCVTLHCSTYNNTHNISKEIKNCSFNATTELRDKRRKEYALFYRLDIVPLNKNGRQYRLINCNTSVCTQVCPKLTFDPIPIHYCAPAGYAILKCNNKTFNGTGPCNNVSTVQCTHGIKPVLSTQLLLNGSLAEEEIIIRSENLTDNVKTIIVHLNESVEINCTRPNNNTRKSIRIGPGQTFYATGDIIGDIRQAHCNISEIKWNKTLQRVSEKLREHFNKTIIFNQSSGGDLEITTHSFNCGGEFFYCNTSDLFFNKTFNETYSTGSNSTNSNITLPCRIKQIINMWQEVGRCMYASPIAGEITCKSNITGLLLTRDGGGNNSTEETFRPGGGNMRDNWRSELYKYKVVEVKPLGIAPTECRRRVVQGGGGSGGGGSAVVGLGAVFLGFLGTAGSTMGAASMTLTVQARQLLGSAGSAGSGSAGSGSAGSGSAGSTVWGIKQLQARVLAIERYLKDQQLLGMWGCSGKLICCTNVYWNSSWSNKTYNEIWDNMTWMQWDREIDNYTDTIYKLLEVSQKQQESNEKDLLALDSWNNLWNWFDISKWLWYIKIFIMIVGGLIGLRIIFAVLSLVNRVRQGI

SEQ ID NO: 314 - protein, 700 aa, synthetic construct
MDSKGSSQKGSRLLLLLVVSNLLLPQGVLALWVTVYYGVPVWREAKTTLFCASDAKSYEKEVHNIWATHACVPTDPNPQELVLKNVTENFNMWKNDMVDQMHEDIISLWDQSLKPCVKLTPLCVTLHCSTYNNTHNISKEIKNCSFNATTELRDKRRKEYALFYRLDIVPLNKNGRQYRLINCNTSVCTQVCPKLTFDPIPIHYCAPAGYAILKCNNKTFNGTGPCNNVSTVQCTHGIKPVLSTQLLLNGSLAEEEIIIRSENLTDNVKTIIVHLNESVEINCTRPNNNMRKSIRIGPGQTFYALGDIIGDIRQPHCNISEIKWNKTLQRVSEKLREHFNKTIIFNQSSGGDLEITTHSFNCGGEFFYCNTSDLFFNKTFNETYSTGSNSTNSNITLPCRIKQIINMWQEVGRCMYAPPIAGNITCKSNITGLLLTRDGGGNNSTEETFRPGGGNMRDNWRSELYKYKVVEVKPLGIAPTECRRRVVQGGGGSGGGGSAVVGLGAVFLGFLGTAGSTMGAASMTLTVQARQLLGSAGSAGSGSAGSGSAGSGSAGSTVWGFKQLQARVLAIERYLEVQQLLGMWGCSGKLICCTNVPWNSSWSNKTYNEIWDNMTWMQWDREIGNYTDTIYKLLEVSQFQQEINEKDLLALDSWNNLWNWFDISKWLWYIKIFIMIVGGLIGLRIIFAVLSLVNRVRQGI

SEQ ID NO: 315 - protein, 700 aa, synthetic construct
MDSKGSSQKGSRLLLLLVVSNLLLPQGVLALWVTVYYGVPVWREAKTTLFCASDAKSYEKEVANIWATHACVPTDPNPQELVLKNVTENFNMWKNDMVDQMHEDIISLWDQSLKPCVKLTPLCVTLHCSTYNNTHNISKEIKNCSFNATTELRDKRRKEYALFYRLDIVPLNKNGRQYRLINCNTSVCTQVCPKLTFDPIPIHYCAPAGYAILKCNNKTFNGTGPCNNVSTVQCTHGIKPVLSTQLLLNGSLAEEEIIIRSENLTDNVKTIIVHLNESVEINCTRPNNNTRKSIRIGPGQWFYATGDIIGDIRQAHCNISEIKWNKTLQRVSEKLREHFNKTIIFNQSSGGDLEITTHSFNCGGEFFYCNTSDLFFNKTFNETYSTGSNSTNSNITLPCRIKQIINMWQEVGRCMYASPIAGEITCKSNITGLLLTRDGGGNNSTEETFRPGGGNMRDNWRSELYKYKVVEVKPLGIAPTECRRRVVQGGGGSGGGGSAVVGLGAVFLGFLGTAGSTMGAASMTLTVQARQLLGSAGSAGSGSAGSGSAGSGSAGSTVWGIKQLQARVLAIERYLKDQQLLGMWGCSGKLICCTNVYWNSSWSNKTYNEIWDNMTWMQWDREIDNYTDTIYKLLEVSQKQQEKNEQDLLALDSWNNLWNWFDISKWLWYIKIFIMIVGGLIGLRIIFAVLSLVNRVRQGI

SEQ ID NO: 316 - protein, 700 aa, synthetic construct
MDSKGSSQKGSRLLLLLVVSNLLLPQGVLALWVTVYYGVPVWREAKTTLFCASDAKSYEKEVANIWATHACVPTDPNPQELVLKNVTENFNMWKNDMVDQMHEDIISLWDQSLKPCVKLTPLCVTLHCSTYNNTHNISKEIKNCSFNATTELRDKRRKEYALFYRLDIVPLNKNGRQYRLINCNTSVCTQVCPKLTFDPIPIHYCAPAGYAILKCNNKTFNGTGPCNNVSTVQCTHGIKPVLSTQLLLNGSLAEEEIIIRSENLTDNVKTIIVHLNESVEINCTRPNNMTRKSIRIGPGQWFYALGDIIGDIRQPHCNISEIKWNKTLQRVSEKLREHFNKTIIFNQSSGGDLEITTHSFNCGGEFFYCNTSDLFFNKTFNETYSTGSNSTNSNITLPCRIKQIINMWQEVGRCMYAPPIAGNITCKSNITGLLLTRDGGGNNSTEETFRPGGGNMRDNWRSELYKYKVVEVKPLGIAPTECRRRVVQGGGGSGGGGSAVVGLGAVFLGFLGTAGSTMGAASMTLTVQARQLLGSAGSAGSGSAGSGSAGSGSAGSTVWGFKQLQARVLAIERYLEVQQLLGMWGCSGKLICCTNVPWNSSWSNKTYNEIWDNMTWMQWDREIGNYTDTIYKLLEVSQFQQEKNEQDLLALDSWNNLWNWFDISKWLWYIKIFIMIVGGLIGLRIIFAVLSLVNRVRQGI

SEQ ID NO: 317 - protein, 743 aa, synthetic construct
MDSKGSSQKGSRLLLLLVVSNLLLPQGVLALWVTVYYGVPVWREAKTTLFCASDAKSYEKEVHNIWATHACVPTDPNPQELVLKNVTENFNMWKNDMVDQMHEDIISLWDQSLKPCVKLTPLCVTLHCSTYNNTHNISKEIKNCSFNATTELRDKRRKEYALFYRLDIVPLNKNGRQYRLINCNTSVCTQVCPKLTFDPIPIHYCAPAGYAILKCNNKTFNGTGPCNNVSTVQCTHGIKPVLSTQLLLNGSLAEEEIIIRSENLTDNVKTIIVHLNESVEINCTRPNNNTRKSIRIGPGQTFYATGDIIGDIRQAHCNISEIKWNKTLQRVSEKLREHFNKTIIFNQSSGGDLEITTHSFNCGGEFFYCNTSDLFFNKTFNETYSTGSNSTNSNITLPCRIKQIINMWQEVGRCMYASPIAGEITCKSNITGLLLTRDGGGNNSTEETFRPGGGNMRDNWRSELYKYKVVEVKPLGIAPTECRRRVVQGGGGSGGGGSAVVGLGAVFLGFLGTAGSTMGAASMTLTVQARQLLGSAGSAGSGSAGSGSAGSGSAGSTVWGIKQLQARVLAIERYLKDQQLLGMWGCSGKLICCTNVYWNSSWSNKTYNEIWDNMTWMQWDREIDNYTDTIYKLLEVSQKQQESNEKDLLALDSWNNLWNWFDISKWLWYIKIFIMIVGGLIGLRIIFAVLSLVNRVRQGISPLSFQTLTPNPRELDRLGGIEEEGGEQDRDRSIRLVSGFFSL

SEQ ID NO: 318 - protein, 743 aa, synthetic construct
MDSKGSSQKGSRLLLLLVVSNLLLPQGVLALWVTVYYGVPVWREAKTTLFCASDAKSYEKEVHNIWATHACVPTDPNPQELVLKNVTENFNMWKNDMVDQMHEDIISLWDQSLKPCVKLTPLCVTLHCSTYNNTHNISKEIKNCSFNATTELRDKRRKEYALFYRLDIVPLNKNGRQYRLINCNTSVCTQVCPKLTFDPIPIHYCAPAGYAILKCNNKTFNGTGPCNNVSTVQCTHGIKPVLSTQLLLNGSLAEEEIIIRSENLTDNVKTIIVHLNESVEINCTRPNNNMRKSIRIGPGQTFYALGDIIGDIRQPHCNISEIKWNKTLQRVSEKLREHFNKTIIFNQSSGGDLEITTHSFNCGGEFFYCNTSDLFFNKTFNETYSTGSNSTNSNITLPCRIKQIINMWQEVGRCMYAPPIAGNITCKSNITGLLLTRDGGGNNSTEETFRPGGGNMRDNWRSELYKYKVVEVKPLGIAPTECRRRVVQGGGGSGGGGSAVVGLGAVFLGFLGTAGSTMGAASMTLTVQARQLLGSAGSAGSGSAGSGSAGSGSAGSTVWGFKQLQARVLAIERYLEVQQLLGMWGCSGKLICCTNVPWNSSWSNKTYNEIWDNMTWMQWDREIGNYTDTIYKLLEVSQFQQEINEKDLLALDSWNNLWNWFDISKWLWYIKIFIMIVGGLIGLRIIFAVLSLVNRVRQGISPLSFQTLTPNPRELDRLGGIEEEGGEQDRDRSIRLVSGFFSL

SEQ ID NO: 319 - protein, 743 aa, synthetic construct
MDSKGSSQKGSRLLLLLVVSNLLLPQGVLALWVTVYYGVPVWREAKTTLFCASDAKSYEKEVANIWATHACVPTDPNPQELVLKNVTENFNMWKNDMVDQMHEDIISLWDQSLKPCVKLTPLCVTLHCSTYNNTHNISKEIKNCSFNATTELRDKRRKEYALFYRLDIVPLNKNGRQYRLINCNTSVCTQVCPKLTFDPIPIHYCAPAGYAILKCNNKTFNGTGPCNNVSTVQCTHGIKPVLSTQLLLNGSLAEEEIIIRSENLTDNVKTIIVHLNESVEINCTRPNNNTRKSIRIGPGQWFYATGDIIGDIRQAHCNISEIKWNKTLQRVSEKLREHFNKTIIFNQSSGGDLEITTHSFNCGGEFFYCNTSDLFFNKTFNETYSTGSNSTNSNITLPCRIKQIINMWQEVGRCMYASPIAGEITCKSNITGLLLTRDGGGNNSTEETFRPGGGNMRDNWRSELYKYKVVEVKPLGIAPTECRRRVVQGGGGSGGGGSAVVGLGAVFLGFLGTAGSTMGAASMTLTVQARQLLGSAGSAGSGSAGSGSAGSGSAGSTVWGIKQLQARVLAIERYLKDQQLLGMWGCSGKLICCTNVYWNSSWSNKTYNEIWDNMTWMQWDREIDNYTDTIYKLLEVSQKQQEKNEQDLLALDSWNNLWNWFDISKWLWYIKIFIMIVGGLIGLRIIFAVLSLVNRVRQGISPLSFQTLTPNPRELDRLGGIEEEGGEQDRDRSIRLVSGFFSL

SEQ ID NO: 320 - protein, 743 aa, synthetic construct
MDSKGSSQKGSRLLLLLVVSNLLLPQGVLALWVTVYYGVPVWREAKTTLFCASDAKSYEKEVANIWATHACVPTDPNPQELVLKNVTENFNMWKNDMVDQMHEDIISLWDQSLKPCVKLTPLCVTLHCSTYNNTHNISKEIKNCSFNATTELRDKRRKEYALFYRLDIVPLNKNGRQYRLINCNTSVCTQVCPKLTFDPIPIHYCAPAGYAILKCNNKTFNGTGPCNNVSTVQCTHGIKPVLSTQLLLNGSLAEEEIIIRSENLTDNVKTIIVHLNESVEINCTRPNNMTRKSIRIGPGQWFYALGDIIGDIRQPHCNISEIKWNKTLQRVSEKLREHFNKTIIFNQSSGGDLEITTHSFNCGGEFFYCNTSDLFFNKTFNETYSTGSNSTNSNITLPCRIKQIINMWQEVGRCMYAPPIAGNITCKSNITGLLLTRDGGGNNSTEETFRPGGGNMRDNWRSELYKYKVVEVKPLGIAPTECRRRVVQGGGGSGGGGSAVVGLGAVFLGFLGTAGSTMGAASMTLTVQARQLLGSAGSAGSGSAGSGSAGSGSAGSTVWGFKQLQARVLAIERYLEVQQLLGMWGCSGKLICCTNVPWNSSWSNKTYNEIWDNMTWMQWDREIGNYTDTIYKLLEVSQFQQEKNEQDLLALDSWNNLWNWFDISKWLWYIKIFIMIVGGLIGLRIIFAVLSLVNRVRQGISPLSFQTLTPNPRELDRLGGIEEEGGEQDRDRSIRLVSGFFSL

SEQ ID NO: 321 - protein, 738 aa, synthetic construct
MDSKGSSQKGSRLLLLLVVSNLLLPQGVLALWVTVYYGVPVWREAKTTLFCASDAKSYEKEVHNIWATHACVPTDPNPQELVLKNVTENFNMWKNDMVDQMHEDIISLWDQSLKPCVKLTPLCVTLHCSTYNNTHNISKEIKNCSFNATTELRDKRRKEYALFYRLDIVPLNKNGRQYRLINCNTSVCTQVCPKLTFDPIPIHYCAPAGYAILKCNNKTFNGTGPCNNVSTVQCTHGIKPVLSTQLLLNGSLAEEEIIIRSENLTDNVKTIIVHLNESVEINCTRPNNNTRKSIRIGPGQTFYATGDIIGDIRQAHCNISEIKWNKTLQRVSEKLREHFNKTIIFNQSSGGDLEITTHSFNCGGEFFYCNTSDLFFNKTFNETYSTGSNSTNSNITLPCRIKQIINMWQEVGRCMYASPIAGEITCKSNITGLLLTRDGGGNNSTEETFRPGGGNMRDNWRSELYKYKVVEVKPLGIAPTECRRRVVQGGGGSGGGGSAVVGLGAVFLGFLGTAGSTMGAASMTLTVQARQLLGSAGSAGSGSAGSGSAGSGSAGSTVWGIKQLQARVLAIERYLKDQQLLGMWGCSGKLICCTNVYWNSSWSNKTYNEIWDNMTWMQWDREIDNYTDTIYKLLEVSQKQQESNEKDLLALDSWNNLWNWFDISKWLWYIKIFIMIVGGLIGLRIIFAVLSLVNRVRQGISPLSFQTLTPNPRELDRLGGIEEEGGEQDRDRSIRLVS

SEQ ID NO: 322 - protein, 738 aa, synthetic construct
MDSKGSSQKGSRLLLLLVVSNLLLPQGVLALWVTVYYGVPVWREAKTTLFCASDAKSYEKEVHNIWATHACVPTDPNPQELVLKNVTENFNMWKNDMVDQMHEDIISLWDQSLKPCVKLTPLCVTLHCSTYNNTHNISKEIKNCSFNATTELRDKRRKEYALFYRLDIVPLNKNGRQYRLINCNTSVCTQVCPKLTFDPIPIHYCAPAGYAILKCNNKTFNGTGPCNNVSTVQCTHGIKPVLSTQLLLNGSLAEEEIIIRSENLTDNVKTIIVHLNESVEINCTRPNNNMRKSIRIGPGQTFYALGDIIGDIRQPHCNISEIKWNKTLQRVSEKLREHFNKTIIFNQSSGGDLEITTHSFNCGGEFFYCNTSDLFFNKTFNETYSTGSNSTNSNITLPCRIKQIINMWQEVGRCMYAPPIAGNITCKSNITGLLLTRDGGGNNSTEETFRPGGGNMRDNWRSELYKYKVVEVKPLGIAPTECRRRVVQGGGGSGGGGSAVVGLGAVFLGFLGTAGSTMGAASMTLTVQARQLLGSAGSAGSGSAGSGSAGSGSAGSTVWGFKQLQARVLAIERYLEVQQLLGMWGCSGKLICCTNVPWNSSWSNKTYNEIWDNMTWMQWDREIGNYTDTIYKLLEVSQFQQEINEKDLLALDSWNNLWNWFDISKWLWYIKIFIMIVGGLIGLRIIFAVLSLVNRVRQGISPLSFQTLTPNPRELDRLGGIEEEGGEQDRDRSIRLVS

SEQ ID NO: 323 - protein, 738 aa, synthetic construct
MDSKGSSQKGSRLLLLLVVSNLLLPQGVLALWVTVYYGVPVWREAKTTLFCASDAKSYEKEVANIWATHACVPTDPNPQELVLKNVTENFNMWKNDMVDQMHEDIISLWDQSLKPCVKLTPLCVTLHCSTYNNTHNISKEIKNCSFNATTELRDKRRKEYALFYRLDIVPLNKNGRQYRLINCNTSVCTQVCPKLTFDPIPIHYCAPAGYAILKCNNKTFNGTGPCNNVSTVQCTHGIKPVLSTQLLLNGSLAEEEIIIRSENLTDNVKTIIVHLNESVEINCTRPNNNTRKSIRIGPGQWFYATGDIIGDIRQAHCNISEIKWNKTLQRVSEKLREHFNKTIIFNQSSGGDLEITTHSFNCGGEFFYCNTSDLFFNKTFNETYSTGSNSTNSNITLPCRIKQIINMWQEVGRCMYASPIAGEITCKSNITGLLLTRDGGGNNSTEETFRPGGGNMRDNWRSELYKYKVVEVKPLGIAPTECRRRVVQGGGGSGGGGSAVVGLGAVFLGFLGTAGSTMGAASMTLTVQARQLLGSAGSAGSGSAGSGSAGSGSAGSTVWGIKQLQARVLAIERYLKDQQLLGMWGCSGKLICCTNVYWNSSWSNKTYNEIWDNMTWMQWDREIDNYTDTIYKLLEVSQKQQEKNEQDLLALDSWNNLWNWFDISKWLWYIKIFIMIVGGLIGLRIIFAVLSLVNRVRQGISPLSFQTLTPNPRELDRLGGIEEEGGEQDRDRSIRLVS

SEQ ID NO: 324 - protein, 646 aa, synthetic construct
MGWSCIILFLVATATGVHAVENLWVTVYYGVPVWRDADTTLFCASDAKAYETEKHNVWATHACVPTDPNPQEIHLDNVTEKFNMWKNNMVEQMHTDIISLWDQSLKPCVKLTPLCVTLHCTNVTSVNTTGDREGLKNCSFNMTTELRDKRQKVYSLFYRLDIVPINENQGSEYRLINCNTSACTQACPKVSFEPIPIHYCTPAGFAILKCKDEGFNGTGLCKNVSTVQCTHGIKPVVSTQLLLNGSLAEKNITIRSENITNNAKIIIVQLVQPVTIKCIRPNNNTRKSIRIGPGQAFYATGDIIGDIRQAHCNVTRSRWNKTLQEVAEKLRTYFGNKTIIFANSSGGDLEITTHSFNCGGEFFYCNTSGLFNSTWYVNSTWNDTDSTQESNDTITLPCRIKQIINMWQRAGQCMYAPPIPGVIKCESNITGLLLTRDGGKDNNVNETFRPGGGDMRDNWRSELYKYKVVEIEPLGVAPTRCKRRVVERRRRRRAVGIGAVFLGFLGAAGSTMGATSMTLTVQARQLLGSAGSAGSGSAGSGSAGSGSAGSTVWGIKQLQARVLAVERYLRDQQLLGIWGCSGKLICCTNVPWNSSWSNKSLDEIWNNMTWLQWDKEINNYTQLIYRLIEESQNQQEKNEQDLLELD

SEQ ID NO: 325 - protein, 650 aa, synthetic construct
MGWSCIILFLVATATGVHAVENLWVTVYYGVPVWRDADTTLFCASDAKAYETEKHNVWATHACVPTDPNPQEIHLDNVTEKFNMWKNNMVEQMHTDIISLWDQSLKPCVKLTPLCVTLHCTNVTSVNTTGDREGLKNCSFNMTTELRDKRQKVYSLFYRLDIVPINENQGSEYRLINCNTSACTQACPKVSFEPIPIHYCTPAGFAILKCKDEGFNGTGLCKNVSTVQCTHGIKPVVSTQLLLNGSLAEKNITIRSENITNNAKIIIVQLVQPVTIKCIRPNNNTRKSIRIGPGQAFYATGDIIGDIRQAHCNVTRSRWNKTLQEVAEKLRTYFGNKTIIFANSSGGDLEITTHSFNCGGEFFYCNTSGLFNSTWYVNSTWNDTDSTQESNDTITLPCRIKQIINMWQRAGQCMYAPPIPGVIKCESNITGLLLTRDGGKDNNVNETFRPGGGDMRDNWRSELYKYKVVEIEPLGVAPTRCKRRVVEGGGGSGGGGSAVGIGAVFLGFLGAAGSTMGATSMTLTVQARQLLGSAGSAGSGSAGSGSAGSGSAGSTVWGIKQLQARVLAVERYLRDQQLLGIWGCSGKLICCTNVPWNSSWSNKSLDEIWNNMTWLQWDKEINNYTQLIYRLIEESQNQQEKNEQDLLELD

SEQ ID NO: 326 - protein, 652 aa, synthetic construct
MGWSCIILFLVATATGVHAVENLWVTVYYGVPVWRDADTTLFCASDAKAYETEKHNVWATHACVPTDPNPQEIHLDNVTEKFNMWKNNMVEQMHTDIISLWDQSLKPCVKLTPLCVTLHCTNVTSVNTTGDREGLKNCSFNMTTELRDKRQKVYSLFYRLDIVPINENQGSEYRLINCNTSACTQACPKVSFEPIPIHYCTPAGFAILKCKDEGFNGTGLCKNVSTVQCTHGIKPVVSTQLLLNGSLAEKNITIRSENITNNAKIIIVQLVQPVTIKCIRPNNNTRKSIRIGPGQAFYATGDIIGDIRQAHCNVTRSRWNKTLQEVAEKLRTYFGNKTIIFANSSGGDLEITTHSFNCGGEFFYCNTSGLFNSTWYVNSTWNDTDSTQESNDTITLPCRIKQIINMWQRAGQCMYAPPIPGVIKCESNITGLLLTRDGGKDNNVNETFRPGGGDMRDNWRSELYKYKVVEIEPLGVAPTRCKRRVVERRRRRRAVGIGAVFLGFLGAAGSTMGATSMTLTVQARQLLGSAGSAGSGSAGSGSAGSGSAGSTVWGIKQLQARVLAVERYLRDQQLLGIWGCSGKLICCTNVPWNSSWSNKSLDEIWNNMTWLQWDKEINNYTQLIYRLIEESQNQQEKNEQDLLELDLPSTGG

SEQ ID NO: 327 - protein, 656 aa, synthetic construct
MGWSCIILFLVATATGVHAVENLWVTVYYGVPVWRDADTTLFCASDAKAYETEKHNVWATHACVPTDPNPQEIHLDNVTEKFNMWKNNMVEQMHTDIISLWDQSLKPCVKLTPLCVTLHCTNVTSVNTTGDREGLKNCSFNMTTELRDKRQKVYSLFYRLDIVPINENQGSEYRLINCNTSACTQACPKVSFEPIPIHYCTPAGFAILKCKDEGFNGTGLCKNVSTVQCTHGIKPVVSTQLLLNGSLAEKNITIRSENITNNAKIIIVQLVQPVTIKCIRPNNNTRKSIRIGPGQAFYATGDIIGDIRQAHCNVTRSRWNKTLQEVAEKLRTYFGNKTIIFANSSGGDLEITTHSFNCGGEFFYCNTSGLFNSTWYVNSTWNDTDSTQESNDTITLPCRIKQIINMWQRAGQCMYAPPIPGVIKCESNITGLLLTRDGGKDNNVNETFRPGGGDMRDNWRSELYKYKVVEIEPLGVAPTRCKRRVVEGGGGSGGGGSAVGIGAVFLGFLGAAGSTMGATSMTLTVQARQLLGSAGSAGSGSAGSGSAGSGSAGSTVWGIKQLQARVLAVERYLRDQQLLGIWGCSGKLICCTNVPWNSSWSNKSLDEIWNNMTWLQWDKEINNYTQLIYRLIEESQNQQEKNEQDLLELDLPSTGG

SEQ ID NO: 328 - protein, 669 aa, synthetic construct; identical to SEQ ID NO: 177

SEQ ID NO: 329 - protein, 658 aa, synthetic construct; identical to SEQ ID NO: 178

SEQ ID NO: 330 - protein, 653 aa, synthetic construct; identical to SEQ ID NO: 179

SEQ ID NO: 331 - protein, 655 aa, synthetic construct; identical to SEQ ID NO: 180

SEQ ID NO: 332 - protein, 662 aa, synthetic construct; identical to SEQ ID NO: 181

SEQ ID NO: 333 - protein, 651 aa, synthetic construct; identical to SEQ ID NO: 182

SEQ ID NO: 334 - protein, 646 aa, synthetic construct; identical to SEQ ID NO: 183

SEQ ID NO: 335 - protein, 646 aa, synthetic construct; identical to SEQ ID NO: 184

SEQ ID NO: 336 - protein, 651 aa, synthetic construct; identical to SEQ ID NO: 185

SEQ ID NO: 337 - protein, 662 aa, synthetic construct; identical to SEQ ID NO: 186

SEQ ID NO: 338 - protein, 666 aa, synthetic construct; identical to SEQ ID NO: 187

SEQ ID NO: 339 - protein, 653 aa, synthetic construct; identical to SEQ ID NO: 188

SEQ ID NO: 340 - protein, 666 aa, synthetic construct; identical to SEQ ID NO: 189

SEQ ID NO: 341 - protein, 638 aa, synthetic construct; identical to SEQ ID NO: 250

SEQ ID NO: 342 - protein, 844 aa, synthetic construct
MTVTGTWRNYQQWWIWGILGFWMLMICNGLWVTVYYGVPVWREAKTTLFCASDAKSYEKEVHNVWATHACVPTDPNPQELVLKNVTENFNMWKNDMVDQMHEDIISLWDQSLKPCVKLTPLCVTLHCSTYNNTHNISKEIKNCSFNATTELRDKRRKEYALFYRLDIVPLNKNGRQYRLINCNTSVITQACPKVTFDPIPIHYCAPAGYAILKCNNKTFNGTGPCNNVSTVQCTHGIKPVVSTQLLLNGSLAEEEIIIRSENLTDNVKTIIVHLNESVEINCTRPNNNTRKSIRIGPGQTFYATGDIIGDIRQAHCNISEIKWNKTLQRVSEKLREHFNKTIIFNQSSGGDLEITTHSFNCGGEFFYCNTSDLFFNKTFNETYSTGSNSTNSNITLPCRIKQIINMWQEVGRAMYASPIAGEITCKSNITGLLLTRDGGGNNSTEETFRPGGGNMRDNWRSELYKYKVVEVKPLGIAPTEARRRVVQKEKRAVVGLGAVFLGFLGTAGSTMGAASITLIVQARQLLSGIVQQQSNLLRAIEAQQHMLQLTVWGIKQLQARVLAIERYLKDQQLLGMWGCSGKLICTTNVYWNSSWSNKTYNEIWDNMTWMQWDREIDNYTDTIYKLLEVSQKQQESKEKDLLALDSWNNLWNWFDISKWLWYIKIFIMIVGGLIGLRIIFAVLSLVNRVRQGYSPLSFQTLTPNPRELDRLGGIEEEGGEQDRDRSIRLVSGFFSLAWNDLRSLCLFCYHRLRDFILIAGRAVELLGRSSLQGLQRGWEILKYLGSLVQYWGLELKKSAINLFDTIAIAVAEGTDRIIEFLQRIVRAILHIPRRIRQGFEAALQ

SEQ ID NO: 343 - protein, 48 aa, synthetic construct
MAISGVPVLGFFIIAVLMSAQESWAGGGGSGGGGSIRPVFSSPPSYFQ

SEQ ID NO: 344 - protein, 48 aa, synthetic construct; identical to SEQ ID NO: 343

SEQ ID NO: 345 - DNA, 2547 bp, synthetic construct
  source 1..2547: mol_type = other DNA
agcataaaagtctcaacacaacatatacaaaacaaacgaatctcaagcaatcaagcattctacttctattgcagcaatttaaatcatttcttttaaagcaaaagcaattttctgaaaattttcaccatttacgaacgatagcgctgccaccatggccatctccggcgtgcccgtgctgggcttcttcatcatcgccgtgctgatgtccgcccaggagtcctgggccggcctgtgggtgaccgtgtactacggcgtgcccgtgtggcgcgaggccaagaccaccctgttctgcgcctccgacgccaagtcctacgagaaggaggtggccaacgtgtgggccacccacgcctgcgtgcccaccgaccccaacccccaggagctggtgctgaagaacgtgaccgagaacttcaacatgtggaagaacgacatggtggaccagatgcacgaggacatcatctccctgtgggaccagtccctgaagccctgcgtgaagctgacccccctgtgcgtgaccctgcactgctccacctacaacaacacccacaacatctccaaggagatcaagaactgctccttcaacgccaccaccgagctgcgcgacaagcgccgcaaggagtacgccctgttctaccgcctggacatcgtgcccctgaacaagaacggccgccagtaccgcctgatcaactgcaacacctccgtgatcacccaggcctgccccaaggtgaccttcgaccccatccccatccactactgcgcccccgccggctacgccatcctgaagtgcaacaacaagaccttcaacggcaccggcccctgcaacaacgtgtccaccgtgcagtgcacccacggcatcaagcccgtggtgtccacccagctgctgctgaacggctccctggccgaggaggagatcatcatccgctccgagaacctgaccgacaacgtgaagaccatcatcgtgcacctgaacgagtccgtggagatcaactgcacccgccccaacaacaacacccgcaagtccatccgcatcggccccggccagaccttctacgccaccggcgacatcatcggcgacatccgccaggcccactgcaacatctccgagatcaagtggaacaagaccctgcagcgcgtgtccgagaagctgcgcgagcacttcaacaagaccatcatcttcaaccagtcctccggcggcgacctggagatcaccacccactccttcaactgcggcggcgagttcttctactgcaacacctccgacctgttcttcaacaagaccttcaacgagacctactccaccggctccaactccaccaactccaacatcaccctgccctgccgcatcaagcagatcatcaacatgtggcaggaggtgggccgcgccatgtacgcctcccccatcgccggcgagatcacctgcaagtccaacatcaccggcctgctgctgacccgcgacggcggcggcaacaactccaccgaggagaccttccgccccggcggcggcaacatgcgcgacaactggcgctccgagctgtacaagtacaaggtggtggaggtgaagcccctgggcatcgcccccaccgaggcccgccgccgcgtggtgcagggcggcggcggctccggcggcggcggctccgccgtggtgggcctgggcgccgtgttcctgggcttcctgggcaccgccggctccaccatgggcgccgcctccatcaccctgaccgtgcaggcccgccagctgctgtccggcatcgtgcagcagcagtccaacctgctgcgcgccatcgaggcccagcagcacatgctgcagctgaccgtgtggggcatcaagcagctgcaggcccgcgtgctgaccatcgagcggtacgccaaggaccagcagctgctgggcatgtggggctgctccggcaagctgatctgcaccaccaacgtgtactggaactcctcctggtccaacaagacctacaacgagatctgggacaacatgacctggatgcagtgggaccgcgagatcgacaactacaccgacaccatctacaagctgctggaggtgtcccagaagcagcaggagtccaacgagaaggacctgctggccctggactcctggaacaacctgtggaactggttcgacatctccaagtggctgtggtacatcaagatcttcatcatgatcgtgggcggcctgatcggcctgcgcatcatcttcgccgtgctgtccctggtgaaccgcgtgcgccagggcatccgccccgtgttctcctcccccccctcctacttccagtaataaactagtagtgactgactaggatctggttaccactaaaccagcctcaagaacacccgaatggagtctctaagctacataataccaacttacacttacaaaatgttgtcccccaaaatgtagccattcgtatctgctcctaataaaaagaaagtttcttcacattctaaaaaaaaaaaaaaaaaaaaaaaaaaaaaaaaaaaaaaaaaaaaaaaaaaaaaaaaaaaaaaaaaaaaaaaaaaaaaaaaaaaaaaaaaaaaaaaaaaaaa

SEQ ID NO: 346 - DNA, 2547 bp, synthetic construct
  source 1..2547: mol_type = other DNA
agcataaaagtctcaacacaacatatacaaaacaaacgaatctcaagcaatcaagcattctacttctattgcagcaatttaaatcatttcttttaaagcaaaagcaattttctgaaaattttcaccatttacgaacgatagcgctgccaccatggccatctccggcgtgcccgtgctgggcttcttcatcatcgccgtgctgatgtccgcccaggagtcctgggccggcctgtgggtgaccgtgtactacggcgtgcccgtgtggcgcgaggccaagaccaccctgttctgcgcctccgacgccaagtcctacgagaaggaggtggccaacatctgggccacccacgcctgcgtgcccaccgaccccaacccccaggagctggtgctgaagaacgtgaccgagaacttcaacatgtggaagaacgacatggtggaccagatgcacgaggacatcatctccctgtgggaccagtccctgaagccctgcgtgaagctgacccccctgtgcgtgaccctgcactgctccacctacaacaacacccacaacatctccaaggagatcaagaactgctccttcaacgccaccaccgagctgcgcgacaagcgccgcaaggagtacgccctgttctaccgcctggacatcgtgcccctgaacaagaacggccgccagtaccgcctgatcaactgcaacacctccgtgatcacccaggtgtgccccaagctgaccttcgaccccatccccatccactactgcgcccccgccggctacgccatcctgaagtgcaacaacaagaccttcaacggcaccggcccctgcaacaacgtgtccaccgtgcagtgcacccacggcatcaagcccgtgctgtccacccagctgctgctgaacggctccctggccgaggaggagatcatcatccgctccgagaacctgaccgacaacgtgaagaccatcatcgtgcacctgaacgagtccgtggagatcaactgcacccgccccaacaacaacacccgcaagtccatccgcatcggccccggccagaccttctacgccaccggcgacatcatcggcgacatccgccaggcccactgcaacatctccgagatcaagtggaacaagaccctgcagcgcgtgtccgagaagctgcgcgagcacttcaacaagaccatcatcttcaaccagtcctccggcggcgacctggagatcaccacccactccttcaactgcggcggcgagttcttctactgcaacacctccgacctgttcttcaacaagaccttcaacgagacctactccaccggctccaactccaccaactccaacatcaccctgccctgccgcatcaagcagatcatcaacatgtggcaggaggtgggccgcgccatgtacgcctcccccatcgccggcgagatcacctgcaagtccaacatcaccggcctgctgctgacccgcgacggcggcggcaacaactccaccgaggagaccttccgccccggcggcggcaacatgcgcgacaactggcgctccgagctgtacaagtacaaggtggtggaggtgaagcccctgggcatcgcccccaccgaggcccgccgccgcgtggtgcagggcggcggcggctccggcggcggcggctccgccgtggtgggcctgggcgccgtgttcctgggcttcctgggcaccgccggctccaccatgggcgccgcctccatcaccctgaccgtgcaggcccgccagctgctgtccggcatcgtgcagcagcagtccaacctgctgcgcgccatcgaggcccagcagcacatgctgcagctgaccgtgtggggcatcaagcagctgcaggcccgcgtgctgaccatcgagcgctacgccaaggaccagcagctgctgggcatgtggggctgctccggcaagctgatctgcaccaccaacgtgtactggaactcctcctggtccaacaagacctacaacgagatctgggacaacatgacctggatgcagtgggaccgcgagatcgacaactacaccgacaccatctacaagctgctggaggtgtcccagaagcagcaggagtccaacgagaaggacctgctggccctggactcctggaacaacctgtggaactggttcgacatctccaagtggctgtggtacatcaagatcttcatcatgatcgtgggcggcctgatcggcctgcgcatcatcttcgccgtgctgtccctggtgaaccgcgtgcgccagggcatccgccccgtgttctcctcccccccctcctacttccagtaataaactagtagtgactgactaggatctggttaccactaaaccagcctcaagaacacccgaatggagtctctaagctacataataccaacttacacttacaaaatgttgtcccccaaaatgtagccattcgtatctgctcctaataaaaagaaagtttcttcacattctaaaaaaaaaaaaaaaaaaaaaaaaaaaaaaaaaaaaaaaaaaaaaaaaaaaaaaaaaaaaaaaaaaaaaaaaaaaaaaaaaaaaaaaaaaaaaaaaaaaaa

SEQ ID NO: 347 - DNA, 2376 bp, synthetic construct
  source 1..2376: mol_type = other DNA
agcataaaagtctcaacacaacatatacaaaacaaacgaatctcaagcaatcaagcattctacttctattgcagcaatttaaatcatttcttttaaagcaaaagcaattttctgaaaattttcaccatttacgaacgatagcgctgccaccatgcccatgggctccctgcagcccctggccaccctgtacctgctgggcatgctggtggcctccgtgctggccgccgagaacctgtgggtgaccgtgtactacggcgtgcccgtgtggcgcgacgccgagaccaccctgttctgcgcctccgacgccaaggcctacgagaccaagaagcgcaacgtgtgggccacccactgctgcgtgcccaccgaccccaacccccaggagatccacctggacaacgtgaccgagaagttcaacatgtggaagaacaacatggtggagcagatgcacaccgacatcatctccctgtgggaccagtccctgaagccctgcgtgaagctgacccccctgtgcgtgaccctgcactgcaccaacgtgacctccgtgaacaccaccggcgaccgcgagggcctgaagaactgctccttcaacatgaccaccgagctgcgcgacaagcgccagaaggtgtactccctgttctaccgcctggacatcgtgcccatcaacgagaaccagggctccgagtaccgcctgatcaactgcaacacctccgccatcacccaggcctgccccaaggtgtccttcgagcccatccccatccactactgcacccccgccggcttcgccatcctgaagtgcaaggacgagggcttcaacggcaccggcctgtgcaagaacgtgtccaccgtgcagtgcacccacggcatcaagcccgtggtgtccacccagctgctgctgaacggctccctggccgagaagaacatcaccatccgctccgagaacatcaccaacaacgccaagatcatcatcgtgcagctggtgcagcccgtgaccatcaagtgcatccgccccaacaacaacacccgcaagtccatccgcatcggccccggccagtggttctacgccaccggcgacatcatcggcgacatccgccaggcccactgcaacgtgacccgctcccgctggaacaagaccctgcaggaggtggccgagaagctgcgcacctacttcggcaacaagaccatcatcttcgccaactcctccggcggcgacctggagatcaccacccactccttcaactgcggcggcgagttcttctactgcaacacctccggcctgttcaactccacctggtacgtgaactccacctggaacgacaccgactccacccaggagtccaacgacaccatcaccctgccctgccgcatcaagcagatcatcaacatgtggcagcgcgccggccaggccatgtacgccccccccatccccggcgtgatcaagtgcgagtccaacatcaccggcctgctgctgacccgcgacggcggcaaggacaacaacgtgaacgagaccttccgccccggcggcggcgacatgcgcgacaactggcgctccgagctgtacaagtacaaggtggtgaagatcgagcccctgggcgtggcccccacccgctgcaagcgccgcgtggtgggccgccgccgccgccgccgcgccgtgggcatcggcgccgtgttcctgggcttcctgggcgccgccggctccaccatgggcgccgcctccatgaccctgaccgtgcaggcccgcaacctgctgtccggcatcgtgcagcagcagtccaacctgctgcgcgcccccgagtgccagcagcacctgctgaagctgaccgtgtggggcatcaagcagctgcaggcccgcgtgctggccgtggagcgctacctgcgcgaccagcagctgctgggcatctggggctgctccggcaagctgatctgctgcaccaacgtgccctggaactcctcctggtccaaccgcaacctgtccgagatctgggacaacatgacctggctgcagtgggacaaggagatctccaactacacccagatcatctacggcctgctggaggagtcccagaaccagcaggagaagaacgagcaggacctgctggccctggactaataaactagtagtgactgactaggatctggttaccactaaaccagcctcaagaacacccgaatggagtctctaagctacataataccaacttacacttacaaaatgttgtcccccaaaatgtagccattcgtatctgctcctaataaaaagaaagtttcttcacattctaaaaaaaaaaaaaaaaaaaaaaaaaaaaaaaaaaaaaaaaaaaaaaaaaaaaaaaaaaaaaaaaaaaaaaaaaaaaaaaaaaaaaaaaaaaaaaaaaaaaa

SEQ ID NO: 348 - DNA, 2355 bp, synthetic construct
  source 1..2355: mol_type = other DNA
agcataaaagtctcaacacaacatatacaaaacaaacgaatctcaagcaatcaagcattctacttctattgcagcaatttaaatcatttcttttaaagcaaaagcaattttctgaaaattttcaccatttacgaacgatagcgctgccaccatgggctggtcctgcatcatcctgttcctggtggccaccgccaccggcgtgcacgccggcctgtgggtgaccgtgtactacggcgtgcccgtgtggcgcgaggccaagaccaccctgttctgcgcctccgacgccaagtcctacgagaaggaggtgcacaacgtgtgggccacccacgcctgcgtgcccaccgaccccaacccccaggagctggtgctggagaacgtgaccgagaacttcaacatgtggaagaacgacatggtggaccagatgcacgaggacatcatctccctgtgggaccagtccctgaagccctgcgtgaagctgacccccctgtgcgtgaccctgaactgctccgacgccaaggtgaacgccacctacaagggcacccgcgaggagatcaagaactgctccttcaacgccaccaccgagctgcgcgacaagaagcgccgcgagtacgccctgttctaccgcctggacatcgtgcccctgtccggcgagggcaacaacaactccgagtaccgcctgatcaactgcaacacctccgtgatcacccagatctgccccaaggtgaccttcgaccccatccccatccactactgcgcccccgccggctacgccatcctgaagtgcaacaacaagaccttcaacggcaccggcccctgcaacaacgtgtccaccgtgcagtgcacccacggcatcaagcccgtggtgtccacccagctgctgctgaacggctccctggccgaggaggagatcatcatccgctccgagaacctgaccgacaacgtgaagaccatcatcgtgcacctgaacgagtccgtggagatcacctgcacccgccccaacaacatgacccgcaagtccgtgcgcatcggccccggccagaccttctacgccctgggcgacatcatcggcgacatccgccagccccactgcaacatctccgagatcaagtgggagaagaccctgcagcgcgtgtccgagaagctgcgcgagcacttcaacaagaccatcatcttcaaccagtcctccggcggcgacctggagatcaccacccactccttcaactgcggcggcgagttcttctactgcaacacctccgacctgttcttcaacaagaccttcaacgagacctactccaccggctccaactccaccaactccaccatcaccctgccctgccgcatcaagcagatcatcaacatgtggcaggaggtgggccgcgccatgtacgccccccccatcgccggcaacatcacctgcaagtccaacatcaccggcctgctgctgacccgcgacggcggcggcaacaactccaccaaggagaccttccgccccggcggcggcaacatgcgcgacaactggcgctccgagctgtacaagtacaaggtggtggaggtgaagcccctgggcatcgcccccaccgagtgcaaccgcaccgtggtgcagcgccgccgccgccgccgcgccgtggtgggcctgggcgccgtgttcctgggcttcctgggcgccgccggctccaccatgggcgccgcctccaacaccctgaccgtgcaggcccgccagctgctgtccggcatcgtgcagcagcagtccaacctgctgcgcgcccccgaggcccagcagcacatgctgcagctgggcgtgtggggcttcaagcagctgcaggcccgcgtgctggccatcgagcgctacctggaggtgcagcagctgctgggcatgtggggctgctccggcaagctgatctgctgcaccaacgtgccctggaactcctcctggtccaacaagacctacaacgagatctgggacaacatgacctggatgcagtgggaccgcgagatcggcaactacaccgacaccatctacaagctgctggaggtgtcccagttccagcaggagatcaacgagaaggacaacctgaccctggactaataaactagtagtgactgactaggatctggttaccactaaaccagcctcaagaacacccgaatggagtctctaagctacataataccaacttacacttacaaaatgttgtcccccaaaatgtagccattcgtatctgctcctaataaaaagaaagtttcttcacattctaaaaaaaaaaaaaaaaaaaaaaaaaaaaaaaaaaaaaaaaaaaaaaaaaaaaaaaaaaaaaaaaaaaaaaaaaaaaaaaaaaaaaaaaaaaaaaaaaaaaa

SEQ ID NO: 349 - DNA, 2337 bp, synthetic construct
  source 1..2337: mol_type = other DNA
agcataaaagtctcaacacaacatatacaaaacaaacgaatctcaagcaatcaagcattctacttctattgcagcaatttaaatcatttcttttaaagcaaaagcaattttctgaaaattttcaccatttacgaacgatagcgctgccaccatgggctggtcctgcatcatcctgttcctggtggccaccgccaccggcgtgcacgccggcctgtgggtgaccgtgtactacggcgtgcccgtgtggcgcgaggccaagaccaccctgttctgcgcctccgacgccaagtcctacgagaaggaggtgcacaacgtgtgggccacccacgcctgcgtgcccaccgaccccaacccccaggagctggtgctggagaacgtgaccaagaacttcaacatgtggaagaacgacatggtggaccagatgcacgaggacatcatctccctgtgggaccagtccctgaagccctgcgtgaagctgacccccctgtgcgtgaccctgcactgctccacctacaacaacacccacaacatctccaaggagatcaagaactgctccttcaacgccaccaccgagctgcgcgacaagaagaagaaggagtacgccctgttctaccgcctggacatcgtgcccctgaacaagaacggccgccagtaccgcctgatcaactgcaacacctccgtgatcacccagatctgccccaaggtgaccttcgaccccatccccatccactactgcgcccccgccggctacgccatcctgaagtgcaacaacaagaccttcaacggcaccggcccctgcaacaacgtgtccaccgtgcagtgcacccacggcatcaagcccgtggtgtccacccagctgctgctgaacggctccctggccgaggaggagatcatcatccgctccgagaacctgaccgacaacgtgaagaccatcatcgtgcacctgaacgagtccgtggagatcacctgcacccgccccaacaacatgacccgcaagtccgtgcgcatcggccccggccagaccttctacgccctgggcgacatcatcggcgacatccgccagccccactgcaacatctccgagatcaagtgggagaagaccctgcagcgcgtgtccgagaagctgcgcgagcacttcaacaagaccatcatcttcaaccagtcctccggcggcgacctggagatcaccacccactccttcaactgcggcggcgagttcttctactgcaacacctccgacctgttcttcaacaagaccttcaacgagacctactccaccggctccaactccaccaactccaccatcaccctgccctgccgcatcaagcagatcatcaacatgtggcaggaggtgggccgcgccatgtacgccccccccatcgccggcaacatcacctgcaagtccaacatcaccggcctgctgctgacccgcgacggcggcggcaacaactccaccaaggagaccttccgccccggcggcggcaacatgcgcgacaactggcgctccgagctgtacaagtacaaggtggtggaggtgaagcccctgggcatcgcccccaccgagtgcaaccgcaccgtggtgcagcgccgccgccgccgccgcgccgtggtgggcctgggcgccgtgttcctgggcttcctgggcgccgccggctccaccatgggcgccgcctccaacaccctgaccgtgcaggcccgccagctgctgtccggcatcgtgcagcagcagtccaacctgctgcgcgcccccgaggcccagcagcacatgctgcagctgggcgtgtggggcttcaagcagctgcaggcccgcgtgctggccatcgagcgctacctggaggtgcagcagctgctgggcatgtggggctgctccggcaagctgatctgctgcaccaacgtgccctggaactcctcctggtccaacaagacctacaacgagatctgggacaacatgacctggatgcagtgggaccgcgagatcggcaactacaccgacaccatctacaagctgctggaggtgtcccagttccagcaggagatcaacgagaaggacaacctgaccctggactaataaactagtagtgactgactaggatctggttaccactaaaccagcctcaagaacacccgaatggagtctctaagctacataataccaacttacacttacaaaatgttgtcccccaaaatgtagccattcgtatctgctcctaataaaaagaaagtttcttcacattctaaaaaaaaaaaaaaaaaaaaaaaaaaaaaaaaaaaaaaaaaaaaaaaaaaaaaaaaaaaaaaaaaaaaaaaaaaaaaaaaaaaaaaaaaaaaaaaaaaaaa

SEQ ID NO: 350 - DNA, 2943 bp, synthetic construct
  source 1..2943: mol_type = other DNA
agcataaaagtctcaacacaacatatacaaaacaaacgaatctcaagcaatcaagcattctacttctattgcagcaatttaaatcatttcttttaaagcaaaagcaattttctgaaaattttcaccatttacgaacgatagcgctgccaccatgggctggtcctgcatcatcctgttcctggtggccaccgccaccggcgtgcacgccctgtgggtgaccgtgtactacggcgtgcccgtgtggcgcgaggccaagaccaccctgttctgcgcctccgacgccaagtcctacgagaaggaggtgcacaacatctgggccacccacgcctgcgtgcccaccgaccccaacccccaggagctggtgctgaagaacgtgaccgagaacttcaacatgtggaagaacgacatggtggaccagatgcacgaggacatcatctccctgtgggaccagtccctgaagccctgcgtgaagctgacccccctgtgcgtgaccctgcactgctccacctacaacaacacccacaacatctccaaggagatcaagaactgctccttcaacgccaccaccgagctgcgcgacaagcgccgcaaggagtacgccctgttctaccgcctggacatcgtgcccctgaacaagaacggccgccagtaccgcctgatcaactgcaacacctccgtgatcacccaggtgtgccccaagctgaccttcgaccccatccccatccactactgcgcccccgccggctacgccatcctgaagtgcaacaacaagaccttcaacggcaccggcccctgcaacaacgtgtccaccgtgcagtgcacccacggcatcaagcccgtgctgtccacccagctgctgctgaacggctccctggccgaggaggagatcatcatccgctccgagaacctgaccgacaacgtgaagaccatcatcgtgcacctgaacgagtccgtggagatcaactgcacccgccccaacaacaacacccgcaagtccatccgcatcggccccggccagaccttctacgccaccggcgacatcatcggcgacatccgccaggcccactgcaacatctccgagatcaagtggaacaagaccctgcagcgcgtgtccgagaagctgcgcgagcacttcaacaagaccatcatcttcaaccagtcctccggcggcgacctggagatcaccacccactccttcaactgcggcggcgagttcttctactgcaacacctccgacctgttcttcaacaagaccttcaacgagacctactccaccggctccaactccaccaactccaacatcaccctgccctgccgcatcaagcagatcatcaacatgtggcaggaggtgggccgcgccatgtacgcctcccccatcgccggcgagatcacctgcaagtccaacatcaccggcctgctgctgacccgcgacggcggcggcaacaactccaccgaggagaccttccgccccggcggcggcaacatgcgcgacaactggcgctccgagctgtacaagtacaaggtggtggaggtgaagcccctgggcatcgcccccaccgagtgccgccgccgcgtggtgcagggcggcggcggctccggcggcggcggctccgccgtggtgggcctgggcgccgtgttcctgggcttcctgggcaccgccggctccaccatgggcgccgcctccatgaccctgaccgtgcaggcccgccagctgctgggctccgccggctccgccggctccggctccgccggctccggctccgccggctccggctccgccggctccaccgtgtggggcatcaagcagctgcaggcccgcgtgctggccatcgagcgctacctgaaggaccagcagctgctgggcatgtggggctgctccggcaagctgatctgctgcaccaacgtgtactggaactcctcctggtccaacaagacctacaacgagatctgggacaacatgacctggatgcagtgggaccgcgagatcgacaactacaccgacaccatctacaagctgctggaggtgtcccagaagcagcaggagtccaacgagaaggacctgctggccctggactcctggaacaacctgtggaactggttcgacatctccaagtggctgtggtacatcaagatcttcatcatgatcgtgggcggcctgatcggcctgcgcatcatcttcgccgtgctgtccctggtgaaccgcgtgcgccagggcatctcccccctgtccttccagaccctgacccccaacccccgcgagctggaccgcctgggcggcatcgaggaggagggcggcgagcaggaccgcgaccgctccatccgcctggtgtccggcttcttctccctggcctggaacgacctgcgctccctgtgcctgttctgctaccaccgcctgcgcgacttcatcctgatcgccggccgcgccgtggagctgctgggccgctcctccctgcagggcctgcagcgcggctgggagatcctgaagtacctgggctccctggtgcagtactggggcctggagctgaagaagtccgccatcaacctgttcgacaccatcgccatcgccgtggccgagggcaccgaccgcatcatcgagttcctgcagcgcatcgtgcgcgccatcctgcacatcccccgccgcatccgccagggcttcgaggccgccctgcagtaataaactagtagtgactgactaggatctggttaccactaaaccagcctcaagaacacccgaatggagtctctaagctacataataccaacttacacttacaaaatgttgtcccccaaaatgtagccattcgtatctgctcctaataaaaagaaagtttcttcacattctaaaaaaaaaaaaaaaaaaaaaaaaaaaaaaaaaaaaaaaaaaaaaaaaaaaaaaaaaaaaaaaaaaaaaaaaaaaaaaaaaaaaaaaaaaaaaaaaaaaaa

SEQ ID NO: 351 - DNA, 2943 bp, synthetic construct
  source 1..2943: mol_type = other DNA
agcataaaagtctcaacacaacatatacaaaacaaacgaatctcaagcaatcaagcattctacttctattgcagcaatttaaatcatttcttttaaagcaaaagcaattttctgaaaattttcaccatttacgaacgatagcgctgccaccatgggctggtcctgcatcatcctgttcctggtggccaccgccaccggcgtgcacgccctgtgggtgaccgtgtactacggcgtgcccgtgtggcgcgaggccaagaccaccctgttctgcgcctccgacgccaagtcctacgagaaggaggtgcacaacatctgggccacccacgcctgcgtgcccaccgaccccaacccccaggagctggtgctgaagaacgtgaccgagaacttcaacatgtggaagaacgacatggtggaccagatgcacgaggacatcatctccctgtgggaccagtccctgaagccctgcgtgaagctgacccccctgtgcgtgaccctgcactgctccacctacaacaacacccacaacatctccaaggagatcaagaactgctccttcaacgccaccaccgagctgcgcgacaagcgccgcaaggagtacgccctgttctaccgcctggacatcgtgcccctgaacaagaacggccgccagtaccgcctgatcaactgcaacacctccgtgtgcacccaggtgtgccccaagctgaccttcgaccccatccccatccactactgcgcccccgccggctacgccatcctgaagtgcaacaacaagaccttcaacggcaccggcccctgcaacaacgtgtccaccgtgcagtgcacccacggcatcaagcccgtgctgtccacccagctgctgctgaacggctccctggccgaggaggagatcatcatccgctccgagaacctgaccgacaacgtgaagaccatcatcgtgcacctgaacgagtccgtggagatcaactgcacccgccccaacaacaacacccgcaagtccatccgcatcggccccggccagaccttctacgccaccggcgacatcatcggcgacatccgccaggcccactgcaacatctccgagatcaagtggaacaagaccctgcagcgcgtgtccgagaagctgcgcgagcacttcaacaagaccatcatcttcaaccagtcctccggcggcgacctggagatcaccacccactccttcaactgcggcggcgagttcttctactgcaacacctccgacctgttcttcaacaagaccttcaacgagacctactccaccggctccaactccaccaactccaacatcaccctgccctgccgcatcaagcagatcatcaacatgtggcaggaggtgggccgctgcatgtacgcctcccccatcgccggcgagatcacctgcaagtccaacatcaccggcctgctgctgacccgcgacggcggcggcaacaactccaccgaggagaccttccgccccggcggcggcaacatgcgcgacaactggcgctccgagctgtacaagtacaaggtggtggaggtgaagcccctgggcatcgcccccaccgagtgccgccgccgcgtggtgcagggcggcggcggctccggcggcggcggctccgccgtggtgggcctgggcgccgtgttcctgggcttcctgggcaccgccggctccaccatgggcgccgcctccatgaccctgaccgtgcaggcccgccagctgctgggctccgccggctccgccggctccggctccgccggctccggctccgccggctccggctccgccggctccaccgtgtggggcatcaagcagctgcaggcccgcgtgctggccatcgagcgctacctgaaggaccagcagctgctgggcatgtggggctgctccggcaagctgatctgctgcaccaacgtgtactggaactcctcctggtccaacaagacctacaacgagatctgggacaacatgacctggatgcagtgggaccgcgagatcgacaactacaccgacaccatctacaagctgctggaggtgtcccagaagcagcaggagtccaacgagaaggacctgctggccctggactcctggaacaacctgtggaactggttcgacatctccaagtggctgtggtacatcaagatcttcatcatgatcgtgggcggcctgatcggcctgcgcatcatcttcgccgtgctgtccctggtgaaccgcgtgcgccagggcatctcccccctgtccttccagaccctgacccccaacccccgcgagctggaccgcctgggcggcatcgaggaggagggcggcgagcaggaccgcgaccgctccatccgcctggtgtccggcttcttctccctggcctggaacgacctgcgctccctgtgcctgttctgctaccaccgcctgcgcgacttcatcctgatcgccggccgcgccgtggagctgctgggccgctcctccctgcagggcctgcagcgcggctgggagatcctgaagtacctgggctccctggtgcagtactggggcctggagctgaagaagtccgccatcaacctgttcgacaccatcgccatcgccgtggccgagggcaccgaccgcatcatcgagttcctgcagcgcatcgtgcgcgccatcctgcacatcccccgccgcatccgccagggcttcgaggccgccgccgcctaataaactagtagtgactgactaggatctggttaccactaaaccagcctcaagaacacccgaatggagtctctaagctacataataccaacttacacttacaaaatgttgtcccccaaaatgtagccattcgtatctgctcctaataaaaagaaagtttcttcacattctaaaaaaaaaaaaaaaaaaaaaaaaaaaaaaaaaaaaaaaaaaaaaaaaaaaaaaaaaaaaaaaaaaaaaaaaaaaaaaaaaaaaaaaaaaaaaaaaaaaaa

SEQ ID NO: 352 - DNA, 2937 bp, synthetic construct
  source 1..2937: mol_type = other DNA
agcataaaagtctcaacacaacatatacaaaacaaacgaatctcaagcaatcaagcattctacttctattgcagcaatttaaatcatttcttttaaagcaaaagcaattttctgaaaattttcaccatttacgaacgatagcgctgccaccatgggctggtcctgcatcatcctgttcctggtggccaccgccaccggcgtgcacgccctgtgggtgaccgtgtactacggcgtgcccgtgtggcgcgaggccaagaccaccctgttctgcgcctccgacgccaagtcctacgagaaggaggtgcacaacatctgggccacccacgcctgcgtgcccaccgaccccaacccccaggagctggtgctgaagaacgtgaccgagaacttcaacatgtggaagaacgacatggtggaccagatgcacgaggacatcatctccctgtgggaccagtccctgaagccctgcgtgaagctgacccccctgtgcgtgaccctgcactgctccacctacaacaacacccacaacatctccaaggagatcaagaactgctccttcaacgccaccaccgagctgcgcgacaagcgccgcaaggagtacgccctgttctaccgcctggacatcgtgcccctgaacaagaacggccgccagtaccgcctgatcaactgcaacacctccgtgtgcacccaggtgtgccccaagctgaccttcgaccccatccccatccactactgcgcccccgccggctacgccatcctgaagtgcaacaacaagaccttcaacggcaccggcccctgcaacaacgtgtccaccgtgcagtgcacccacggcatcaagcccgtgctgtccacccagctgctgctgaacggctccctggccgaggaggagatcatcatccgctccgagaacctgaccgacaacgtgaagaccatcatcgtgcacctgaacgagtccgtggagatcaactgcacccgccccaacaacaacatgcgcaagtccatccgcatcggccccggccagaccttctacgccctgggcgacatcatcggcgacatccgccagccccactgcaacatctccgagatcaagtggaacaagaccctgcagcgcgtgtccgagaagctgcgcgagcacttcaacaagaccatcatcttcaaccagtcctccggcggcgacctggagatcaccacccactccttcaactgcggcggcgagttcttctactgcaacacctccgacctgttcttcaacaagaccttcaacgagacctactccaccggctccaactccaccaactccaacatcaccctgccctgccgcatcaagcagatcatcaacatgtggcaggaggtgggccgctgcatgtacgccccccccatcgccggcaacatcacctgcaagtccaacatcaccggcctgctgctgacccgcgacggcggcggcaacaactccaccgaggagaccttccgccccggcggcggcaacatgcgcgacaactggcgctccgagctgtacaagtacaaggtggtggaggtgaagcccctgggcatcgcccccaccgagtgccgccgccgcgtggtgcagggcggcggcggctccggcggcggcggctccgccgtggtgggcctgggcgccgtgttcctgggcttcctgggcaccgccggctccaccatgggcgccgcctccatgaccctgaccgtgcaggcccgccagctgctgggctccgccggctccgccggctccggctccgccggctccggctccgccggctccggctccgccggctccaccgtgtggggcttcaagcagctgcaggcccgcgtgctggccatcgagcgctacctggaggtgcagcagctgctgggcatgtggggctgctccggcaagctgatctgctgcaccaacgtgccctggaactcctcctggtccaacaagacctacaacgagatctgggacaacatgacctggatgcagtgggaccgcgagatcggcaactacaccgacaccatctacaagctgctggaggtgtcccagttccagcaggagatcaacgagaaggacctgctggccctggactcctggaacaacctgtggaactggttcgacatctccaagtggctgtggtacatcaagatcttcatcatgatcgtgggcggcctgatcggcctgcgcatcatcttcgccgtgctgtccctggtgaaccgcgtgcgccagggcatctcccccctgtccttccagaccctgacccccaacccccgcgagctggaccgcctgggcggcatcgaggaggagggcggcgagcaggaccgcgaccgctccatccgcctggtgtccggcttcttctccctggcctggaacgacctgcgctccctgtgcctgttctgctaccaccgcctgcgcgacttcatcctgatcgccggccgcgccgtggagctgctgggccgctcctccctgcagggcctgcagcgcggctgggagatcctgaagtacctgggctccctggtgcagtactggggcctggagctgaagaagtccgccatcaacctgttcgacaccatcgccatcgccgtggccgagggcaccgaccgcatcatcgagttcctgcagcgcatcgtgcgcgccatcctgcacatcccccgccgcatccgccagggcttcgaggccgccgccgccactagtagtgactgactaggatctggttaccactaaaccagcctcaagaacacccgaatggagtctctaagctacataataccaacttacacttacaaaatgttgtcccccaaaatgtagccattcgtatctgctcctaataaaaagaaagtttcttcacattctaaaaaaaaaaaaaaaaaaaaaaaaaaaaaaaaaaaaaaaaaaaaaaaaaaaaaaaaaaaaaaaaaaaaaaaaaaaaaaaaaaaaaaaaaaaaaaaaaaaaa

SEQ ID NO: 353 - DNA, 2943 bp, synthetic construct
  source 1..2943: mol_type = other DNA
agcataaaagtctcaacacaacatatacaaaacaaacgaatctcaagcaatcaagcattctacttctattgcagcaatttaaatcatttcttttaaagcaaaagcaattttctgaaaattttcaccatttacgaacgatagcgctgccaccatgggctggtcctgcatcatcctgttcctggtggccaccgccaccggcgtgcacgccctgtgggtgaccgtgtactacggcgtgcccgtgtggcgcgaggccaagaccaccctgttctgcgcctccgacgccaagtcctacgagaaggaggtggccaacatctgggccacccacgcctgcgtgcccaccgaccccaacccccaggagctggtgctgaagaacgtgaccgagaacttcaacatgtggaagaacgacatggtggaccagatgcacgaggacatcatctccctgtgggaccagtccctgaagccctgcgtgaagctgacccccctgtgcgtgaccctgcactgctccacctacaacaacacccacaacatctccaaggagatcaagaactgctccttcaacgccaccaccgagctgcgcgacaagcgccgcaaggagtacgccctgttctaccgcctggacatcgtgcccctgaacaagaacggccgccagtaccgcctgatcaactgcaacacctccgtgtgcacccaggtgtgccccaagctgaccttcgaccccatccccatccactactgcgcccccgccggctacgccatcctgaagtgcaacaacaagaccttcaacggcaccggcccctgcaacaacgtgtccaccgtgcagtgcacccacggcatcaagcccgtgctgtccacccagctgctgctgaacggctccctggccgaggaggagatcatcatccgctccgagaacctgaccgacaacgtgaagaccatcatcgtgcacctgaacgagtccgtggagatcaactgcacccgccccaacaacaacacccgcaagtccatccgcatcggccccggccagtggttctacgccaccggcgacatcatcggcgacatccgccaggcccactgcaacatctccgagatcaagtggaacaagaccctgcagcgcgtgtccgagaagctgcgcgagcacttcaacaagaccatcatcttcaaccagtcctccggcggcgacctggagatcaccacccactccttcaactgcggcggcgagttcttctactgcaacacctccgacctgttcttcaacaagaccttcaacgagacctactccaccggctccaactccaccaactccaacatcaccctgccctgccgcatcaagcagatcatcaacatgtggcaggaggtgggccgctgcatgtacgcctcccccatcgccggcgagatcacctgcaagtccaacatcaccggcctgctgctgacccgcgacggcggcggcaacaactccaccgaggagaccttccgccccggcggcggcaacatgcgcgacaactggcgctccgagctgtacaagtacaaggtggtggaggtgaagcccctgggcatcgcccccaccgagtgccgccgccgcgtggtgcagggcggcggcggctccggcggcggcggctccgccgtggtgggcctgggcgccgtgttcctgggcttcctgggcaccgccggctccaccatgggcgccgcctccatgaccctgaccgtgcaggcccgccagctgctgggctccgccggctccgccggctccggctccgccggctccggctccgccggctccggctccgccggctccaccgtgtggggcatcaagcagctgcaggcccgcgtgctggccatcgagcgctacctgaaggaccagcagctgctgggcatgtggggctgctccggcaagctgatctgctgcaccaacgtgtactggaactcctcctggtccaacaagacctacaacgagatctgggacaacatgacctggatgcagtgggaccgcgagatcgacaactacaccgacaccatctacaagctgctggaggtgtcccagaagcagcaggagaagaacgagcaggacctgctggccctggactcctggaacaacctgtggaactggttcgacatctccaagtggctgtggtacatcaagatcttcatcatgatcgtgggcggcctgatcggcctgcgcatcatcttcgccgtgctgtccctggtgaaccgcgtgcgccagggcatctcccccctgtccttccagaccctgacccccaacccccgcgagctggaccgcctgggcggcatcgaggaggagggcggcgagcaggaccgcgaccgctccatccgcctggtgtccggcttcttctccctggcctggaacgacctgcgctccctgtgcctgttctgctaccaccgcctgcgcgacttcatcctgatcgccggccgcgccgtggagctgctgggccgctcctccctgcagggcctgcagcgcggctgggagatcctgaagtacctgggctccctggtgcagtactggggcctggagctgaagaagtccgccatcaacctgttcgacaccatcgccatcgccgtggccgagggcaccgaccgcatcatcgagttcctgcagcgcatcgtgcgcgccatcctgcacatcccccgccgcatccgccagggcttcgaggccgccgccgcctaataaactagtagtgactgactaggatctggttaccactaaaccagcctcaagaacacccgaatggagtctctaagctacataataccaacttacacttacaaaatgttgtcccccaaaatgtagccattcgtatctgctcctaataaaaagaaagtttcttcacattctaaaaaaaaaaaaaaaaaaaaaaaaaaaaaaaaaaaaaaaaaaaaaaaaaaaaaaaaaaaaaaaaaaaaaaaaaaaaaaaaaaaaaaaaaaaaaaaaaaaaa

SEQ ID NO: 354 - DNA, 2943 bp, synthetic construct
  source 1..2943: mol_type = other DNA
agcataaaagtctcaacacaacatatacaaaacaaacgaatctcaagcaatcaagcattctacttctattgcagcaatttaaatcatttcttttaaagcaaaagcaattttctgaaaattttcaccatttacgaacgatagcgctgccaccatgggctggtcctgcatcatcctgttcctggtggccaccgccaccggcgtgcacgccctgtgggtgaccgtgtactacggcgtgcccgtgtggcgcgaggccaagaccaccctgttctgcgcctccgacgccaagtcctacgagaaggaggtggccaacatctgggccacccacgcctgcgtgcccaccgaccccaacccccaggagctggtgctgaagaacgtgaccgagaacttcaacatgtggaagaacgacatggtggaccagatgcacgaggacatcatctccctgtgggaccagtccctgaagccctgcgtgaagctgacccccctgtgcgtgaccctgcactgctccacctacaacaacacccacaacatctccaaggagatcaagaactgctccttcaacgccaccaccgagctgcgcgacaagcgccgcaaggagtacgccctgttctaccgcctggacatcgtgcccctgaacaagaacggccgccagtaccgcctgatcaactgcaacacctccgtgtgcacccaggtgtgccccaagctgaccttcgaccccatccccatccactactgcgcccccgccggctacgccatcctgaagtgcaacaacaagaccttcaacggcaccggcccctgcaacaacgtgtccaccgtgcagtgcacccacggcatcaagcccgtgctgtccacccagctgctgctgaacggctccctggccgaggaggagatcatcatccgctccgagaacctgaccgacaacgtgaagaccatcatcgtgcacctgaacgagtccgtggagatcaactgcacccgccccaacaacatgacccgcaagtccatccgcatcggccccggccagtggttctacgccctgggcgacatcatcggcgacatccgccagccccactgcaacatctccgagatcaagtggaacaagaccctgcagcgcgtgtccgagaagctgcgcgagcacttcaacaagaccatcatcttcaaccagtcctccggcggcgacctggagatcaccacccactccttcaactgcggcggcgagttcttctactgcaacacctccgacctgttcttcaacaagaccttcaacgagacctactccaccggctccaactccaccaactccaacatcaccctgccctgccgcatcaagcagatcatcaacatgtggcaggaggtgggccgctgcatgtacgccccccccatcgccggcaacatcacctgcaagtccaacatcaccggcctgctgctgacccgcgacggcggcggcaacaactccaccgaggagaccttccgccccggcggcggcaacatgcgcgacaactggcgctccgagctgtacaagtacaaggtggtggaggtgaagcccctgggcatcgcccccaccgagtgccgccgccgcgtggtgcagggcggcggcggctccggcggcggcggctccgccgtggtgggcctgggcgccgtgttcctgggcttcctgggcaccgccggctccaccatgggcgccgcctccatgaccctgaccgtgcaggcccgccagctgctgggctccgccggctccgccggctccggctccgccggctccggctccgccggctccggctccgccggctccaccgtgtggggcttcaagcagctgcaggcccgcgtgctggccatcgagcgctacctggaggtgcagcagctgctgggcatgtggggctgctccggcaagctgatctgctgcaccaacgtgccctggaactcctcctggtccaacaagacctacaacgagatctgggacaacatgacctggatgcagtgggaccgcgagatcggcaactacaccgacaccatctacaagctgctggaggtgtcccagttccagcaggagaagaacgagcaggacctgctggccctggactcctggaacaacctgtggaactggttcgacatctccaagtggctgtggtacatcaagatcttcatcatgatcgtgggcggcctgatcggcctgcgcatcatcttcgccgtgctgtccctggtgaaccgcgtgcgccagggcatctcccccctgtccttccagaccctgacccccaacccccgcgagctggaccgcctgggcggcatcgaggaggagggcggcgagcaggaccgcgaccgctccatccgcctggtgtccggcttcttctccctggcctggaacgacctgcgctccctgtgcctgttctgctaccaccgcctgcgcgacttcatcctgatcgccggccgcgccgtggagctgctgggccgctcctccctgcagggcctgcagcgcggctgggagatcctgaagtacctgggctccctggtgcagtactggggcctggagctgaagaagtccgccatcaacctgttcgacaccatcgccatcgccgtggccgagggcaccgaccgcatcatcgagttcctgcagcgcatcgtgcgcgccatcctgcacatcccccgccgcatccgccagggcttcgaggccgccgccgcctaataaactagtagtgactgactaggatctggttaccactaaaccagcctcaagaacacccgaatggagtctctaagctacataataccaacttacacttacaaaatgttgtcccccaaaatgtagccattcgtatctgctcctaataaaaagaaagtttcttcacattctaaaaaaaaaaaaaaaaaaaaaaaaaaaaaaaaaaaaaaaaaaaaaaaaaaaaaaaaaaaaaaaaaaaaaaaaaaaaaaaaaaaaaaaaaaaaaaaaaaaaa

SEQ ID NO: 355 - DNA, 2490 bp, synthetic construct
  source 1..2490: mol_type = other DNA
agcataaaagtctcaacacaacatatacaaaacaaacgaatctcaagcaatcaagcattctacttctattgcagcaatttaaatcatttcttttaaagcaaaagcaattttctgaaaattttcaccatttacgaacgatagcgctgccaccatgggctggtcctgcatcatcctgttcctggtggccaccgccaccggcgtgcacgccctgtgggtgaccgtgtactacggcgtgcccgtgtggcgcgaggccaagaccaccctgttctgcgcctccgacgccaagtcctacgagaaggaggtgcacaacatctgggccacccacgcctgcgtgcccaccgaccccaacccccaggagctggtgctgaagaacgtgaccgagaacttcaacatgtggaagaacgacatggtggaccagatgcacgaggacatcatctccctgtgggaccagtccctgaagccctgcgtgaagctgacccccctgtgcgtgaccctgcactgctccacctacaacaacacccacaacatctccaaggagatcaagaactgctccttcaacgccaccaccgagctgcgcgacaagcgccgcaaggagtacgccctgttctaccgcctggacatcgtgcccctgaacaagaacggccgccagtaccgcctgatcaactgcaacacctccgtgatcacccaggtgtgccccaagctgaccttcgaccccatccccatccactactgcgcccccgccggctacgccatcctgaagtgcaacaacaagaccttcaacggcaccggcccctgcaacaacgtgtccaccgtgcagtgcacccacggcatcaagcccgtgctgtccacccagctgctgctgaacggctccctggccgaggaggagatcatcatccgctccgagaacctgaccgacaacgtgaagaccatcatcgtgcacctgaacgagtccgtggagatcaactgcacccgccccaacaacaacacccgcaagtccatccgcatcggccccggccagaccttctacgccaccggcgacatcatcggcgacatccgccaggcccactgcaacatctccgagatcaagtggaacaagaccctgcagcgcgtgtccgagaagctgcgcgagcacttcaacaagaccatcatcttcaaccagtcctccggcggcgacctggagatcaccacccactccttcaactgcggcggcgagttcttctactgcaacacctccgacctgttcttcaacaagaccttcaacgagacctactccaccggctccaactccaccaactccaacatcaccctgccctgccgcatcaagcagatcatcaacatgtggcaggaggtgggccgcgccatgtacgcctcccccatcgccggcgagatcacctgcaagtccaacatcaccggcctgctgctgacccgcgacggcggcggcaacaactccaccgaggagaccttccgccccggcggcggcaacatgcgcgacaactggcgctccgagctgtacaagtacaaggtggtggaggtgaagcccctgggcatcgcccccaccgagtgccgccgccgcgtggtgcagggcggcggcggctccggcggcggcggctccgccgtggtgggcctgggcgccgtgttcctgggcttcctgggcaccgccggctccaccatgggcgccgcctccatgaccctgaccgtgcaggcccgccagctgctgggctccgccggctccgccggctccggctccgccggctccggctccgccggctccggctccgccggctccaccgtgtggggcatcaagcagctgcaggcccgcgtgctggccatcgagcgctacctgaaggaccagcagctgctgggcatgtggggctgctccggcaagctgatctgctgcaccaacgtgtactggaactcctcctggtccaacaagacctacaacgagatctgggacaacatgacctggatgcagtgggaccgcgagatcgacaactacaccgacaccatctacaagctgctggaggtgtcccagaagcagcaggagtccaacgagaaggacctgctggccctggactcctggaacaacctgtggaactggttcgacatctccaagtggctgtggtacatcaagatcttcatcatgatcgtgggcggcctgatcggcctgcgcatcatcttcgccgtgctgtccctggtgaaccgcgtgcgccagggcatctaataaactagtagtgactgactaggatctggttaccactaaaccagcctcaagaacacccgaatggagtctctaagctacataataccaacttacacttacaaaatgttgtcccccaaaatgtagccattcgtatctgctcctaataaaaagaaagtttcttcacattctaaaaaaaaaaaaaaaaaaaaaaaaaaaaaaaaaaaaaaaaaaaaaaaaaaaaaaaaaaaaaaaaaaaaaaaaaaaaaaaaaaaaaaaaaaaaaaaaaaaaa

SEQ ID NO: 356 - RNA, 2490 nt, synthetic construct
  source 1..2490: mol_type = other RNA
agcataaaagtctcaacacaacatatacaaaacaaacgaatctcaagcaatcaagcattctacttctattgcagcaatttaaatcatttcttttaaagcaaaagcaattttctgaaaattttcaccatttacgaacgatagcgctgccaccatgggctggtcctgcatcatcctgttcctggtggccaccgccaccggcgtgcacgccctgtgggtgaccgtgtactacggcgtgcccgtgtggcgcgaggccaagaccaccctgttctgcgcctccgacgccaagtcctacgagaaggaggtgcacaacatctgggccacccacgcctgcgtgcccaccgaccccaacccccaggagctggtgctgaagaacgtgaccgagaacttcaacatgtggaagaacgacatggtggaccagatgcacgaggacatcatctccctgtgggaccagtccctgaagccctgcgtgaagctgacccccctgtgcgtgaccctgcactgctccacctacaacaacacccacaacatctccaaggagatcaagaactgctccttcaacgccaccaccgagctgcgcgacaagcgccgcaaggagtacgccctgttctaccgcctggacatcgtgcccctgaacaagaacggccgccagtaccgcctgatcaactgcaacacctccgtgtgcacccaggtgtgccccaagctgaccttcgaccccatccccatccactactgcgcccccgccggctacgccatcctgaagtgcaacaacaagaccttcaacggcaccggcccctgcaacaacgtgtccaccgtgcagtgcacccacggcatcaagcccgtgctgtccacccagctgctgctgaacggctccctggccgaggaggagatcatcatccgctccgagaacctgaccgacaacgtgaagaccatcatcgtgcacctgaacgagtccgtggagatcaactgcacccgccccaacaacaacacccgcaagtccatccgcatcggccccggccagaccttctacgccaccggcgacatcatcggcgacatccgccaggcccactgcaacatctccgagatcaagtggaacaagaccctgcagcgcgtgtccgagaagctgcgcgagcacttcaacaagaccatcatcttcaaccagtcctccggcggcgacctggagatcaccacccactccttcaactgcggcggcgagttcttctactgcaacacctccgacctgttcttcaacaagaccttcaacgagacctactccaccggctccaactccaccaactccaacatcaccctgccctgccgcatcaagcagatcatcaacatgtggcaggaggtgggccgctgcatgtacgcctcccccatcgccggcgagatcacctgcaagtccaacatcaccggcctgctgctgacccgcgacggcggcggcaacaactccaccgaggagaccttccgccccggcggcggcaacatgcgcgacaactggcgctccgagctgtacaagtacaaggtggtggaggtgaagcccctgggcatcgcccccaccgagtgccgccgccgcgtggtgcagggcggcggcggctccggcggcggcggctccgccgtggtgggcctgggcgccgtgttcctgggcttcctgggcaccgccggctccaccatgggcgccgcctccatgaccctgaccgtgcaggcccgccagctgctgggctccgccggctccgccggctccggctccgccggctccggctccgccggctccggctccgccggctccaccgtgtggggcatcaagcagctgcaggcccgcgtgctggccatcgagcgctacctgaaggaccagcagctgctgggcatgtggggctgctccggcaagctgatctgctgcaccaacgtgtactggaactcctcctggtccaacaagacctacaacgagatctgggacaacatgacctggatgcagtgggaccgcgagatcgacaactacaccgacaccatctacaagctgctggaggtgtcccagaagcagcaggagtccaacgagaaggacctgctggccctggactcctggaacaacctgtggaactggttcgacatctccaagtggctgtggtacatcaagatcttcatcatgatcgtgggcggcctgatcggcctgcgcatcatcttcgccgtgctgtccctggtgaaccgcgtgcgccagggcatctaataaactagtagtgactgactaggatctggttaccactaaaccagcctcaagaacacccgaatggagtctctaagctacataataccaacttacacttacaaaatgttgtcccccaaaatgtagccattcgtatctgctcctaataaaaagaaagtttcttcacattctaaaaaaaaaaaaaaaaaaaaaaaaaaaaaaaaaaaaaaaaaaaaaaaaaaaaaaaaaaaaaaaaaaaaaaaaaaaaaaaaaaaaaaaaaaaaaaaaaaaaa

SEQ ID NO: 357 - RNA, 2490 nt, synthetic construct
  source 1..2490: mol_type = other RNA
agcataaaagtctcaacacaacatatacaaaacaaacgaatctcaagcaatcaagcattctacttctattgcagcaatttaaatcatttcttttaaagcaaaagcaattttctgaaaattttcaccatttacgaacgatagcgctgccaccatgggctggtcctgcatcatcctgttcctggtggccaccgccaccggcgtgcacgccctgtgggtgaccgtgtactacggcgtgcccgtgtggcgcgaggccaagaccaccctgttctgcgcctccgacgccaagtcctacgagaaggaggtgcacaacatctgggccacccacgcctgcgtgcccaccgaccccaacccccaggagctggtgctgaagaacgtgaccgagaacttcaacatgtggaagaacgacatggtggaccagatgcacgaggacatcatctccctgtgggaccagtccctgaagccctgcgtgaagctgacccccctgtgcgtgaccctgcactgctccacctacaacaacacccacaacatctccaaggagatcaagaactgctccttcaacgccaccaccgagctgcgcgacaagcgccgcaaggagtacgccctgttctaccgcctggacatcgtgcccctgaacaagaacggccgccagtaccgcctgatcaactgcaacacctccgtgtgcacccaggtgtgccccaagctgaccttcgaccccatccccatccactactgcgcccccgccggctacgccatcctgaagtgcaacaacaagaccttcaacggcaccggcccctgcaacaacgtgtccaccgtgcagtgcacccacggcatcaagcccgtgctgtccacccagctgctgctgaacggctccctggccgaggaggagatcatcatccgctccgagaacctgaccgacaacgtgaagaccatcatcgtgcacctgaacgagtccgtggagatcaactgcacccgccccaacaacaacatgcgcaagtccatccgcatcggccccggccagaccttctacgccctgggcgacatcatcggcgacatccgccagccccactgcaacatctccgagatcaagtggaacaagaccctgcagcgcgtgtccgagaagctgcgcgagcacttcaacaagaccatcatcttcaaccagtcctccggcggcgacctggagatcaccacccactccttcaactgcggcggcgagttcttctactgcaacacctccgacctgttcttcaacaagaccttcaacgagacctactccaccggctccaactccaccaactccaacatcaccctgccctgccgcatcaagcagatcatcaacatgtggcaggaggtgggccgctgcatgtacgccccccccatcgccggcaacatcacctgcaagtccaacatcaccggcctgctgctgacccgcgacggcggcggcaacaactccaccgaggagaccttccgccccggcggcggcaacatgcgcgacaactggcgctccgagctgtacaagtacaaggtggtggaggtgaagcccctgggcatcgcccccaccgagtgccgccgccgcgtggtgcagggcggcggcggctccggcggcggcggctccgccgtggtgggcctgggcgccgtgttcctgggcttcctgggcaccgccggctccaccatgggcgccgcctccatgaccctgaccgtgcaggcccgccagctgctgggctccgccggctccgccggctccggctccgccggctccggctccgccggctccggctccgccggctccaccgtgtggggcttcaagcagctgcaggcccgcgtgctggccatcgagcgctacctggaggtgcagcagctgctgggcatgtggggctgctccggcaagctgatctgctgcaccaacgtgccctggaactcctcctggtccaacaagacctacaacgagatctgggacaacatgacctggatgcagtgggaccgcgagatcggcaactacaccgacaccatctacaagctgctggaggtgtcccagttccagcaggagatcaacgagaaggacctgctggccctggactcctggaacaacctgtggaactggttcgacatctccaagtggctgtggtacatcaagatcttcatcatgatcgtgggcggcctgatcggcctgcgcatcatcttcgccgtgctgtccctggtgaaccgcgtgcgccagggcatctaataaactagtagtgactgactaggatctggttaccactaaaccagcctcaagaacacccgaatggagtctctaagctacataataccaacttacacttacaaaatgttgtcccccaaaatgtagccattcgtatctgctcctaataaaaagaaagtttcttcacattctaaaaaaaaaaaaaaaaaaaaaaaaaaaaaaaaaaaaaaaaaaaaaaaaaaaaaaaaaaaaaaaaaaaaaaaaaaaaaaaaaaaaaaaaaaaaaaaaaaaaa

SEQ ID NO: 358 - DNA, 2490 bp, synthetic construct
  source 1..2490: mol_type = other DNA
agcataaaagtctcaacacaacatatacaaaacaaacgaatctcaagcaatcaagcattctacttctattgcagcaatttaaatcatttcttttaaagcaaaagcaattttctgaaaattttcaccatttacgaacgatagcgctgccaccatgggctggtcctgcatcatcctgttcctggtggccaccgccaccggcgtgcacgccctgtgggtgaccgtgtactacggcgtgcccgtgtggcgcgaggccaagaccaccctgttctgcgcctccgacgccaagtcctacgagaaggaggtggccaacatctgggccacccacgcctgcgtgcccaccgaccccaacccccaggagctggtgctgaagaacgtgaccgagaacttcaacatgtggaagaacgacatggtggaccagatgcacgaggacatcatctccctgtgggaccagtccctgaagccctgcgtgaagctgacccccctgtgcgtgaccctgcactgctccacctacaacaacacccacaacatctccaaggagatcaagaactgctccttcaacgccaccaccgagctgcgcgacaagcgccgcaaggagtacgccctgttctaccgcctggacatcgtgcccctgaacaagaacggccgccagtaccgcctgatcaactgcaacacctccgtgtgcacccaggtgtgccccaagctgaccttcgaccccatccccatccactactgcgcccccgccggctacgccatcctgaagtgcaacaacaagaccttcaacggcaccggcccctgcaacaacgtgtccaccgtgcagtgcacccacggcatcaagcccgtgctgtccacccagctgctgctgaacggctccctggccgaggaggagatcatcatccgctccgagaacctgaccgacaacgtgaagaccatcatcgtgcacctgaacgagtccgtggagatcaactgcacccgccccaacaacaacacccgcaagtccatccgcatcggccccggccagtggttctacgccaccggcgacatcatcggcgacatccgccaggcccactgcaacatctccgagatcaagtggaacaagaccctgcagcgcgtgtccgagaagctgcgcgagcacttcaacaagaccatcatcttcaaccagtcctccggcggcgacctggagatcaccacccactccttcaactgcggcggcgagttcttctactgcaacacctccgacctgttcttcaacaagaccttcaacgagacctactccaccggctccaactccaccaactccaacatcaccctgccctgccgcatcaagcagatcatcaacatgtggcaggaggtgggccgctgcatgtacgcctcccccatcgccggcgagatcacctgcaagtccaacatcaccggcctgctgctgacccgcgacggcggcggcaacaactccaccgaggagaccttccgccccggcggcggcaacatgcgcgacaactggcgctccgagctgtacaagtacaaggtggtggaggtgaagcccctgggcatcgcccccaccgagtgccgccgccgcgtggtgcagggcggcggcggctccggcggcggcggctccgccgtggtgggcctgggcgccgtgttcctgggcttcctgggcaccgccggctccaccatgggcgccgcctccatgaccctgaccgtgcaggcccgccagctgctgggctccgccggctccgccggctccggctccgccggctccggctccgccggctccggctccgccggctccaccgtgtggggcatcaagcagctgcaggcccgcgtgctggccatcgagcgctacctgaaggaccagcagctgctgggcatgtggggctgctccggcaagctgatctgctgcaccaacgtgtactggaactcctcctggtccaacaagacctacaacgagatctgggacaacatgacctggatgcagtgggaccgcgagatcgacaactacaccgacaccatctacaagctgctggaggtgtcccagaagcagcaggagaagaacgagcaggacctgctggccctggactcctggaacaacctgtggaactggttcgacatctccaagtggctgtggtacatcaagatcttcatcatgatcgtgggcggcctgatcggcctgcgcatcatcttcgccgtgctgtccctggtgaaccgcgtgcgccagggcatctaataaactagtagtgactgactaggatctggttaccactaaaccagcctcaagaacacccgaatggagtctctaagctacataataccaacttacacttacaaaatgttgtcccccaaaatgtagccattcgtatctgctcctaataaaaagaaagtttcttcacattctaaaaaaaaaaaaaaaaaaaaaaaaaaaaaaaaaaaaaaaaaaaaaaaaaaaaaaaaaaaaaaaaaaaaaaaaaaaaaaaaaaaaaaaaaaaaaaaaaaaaa

SEQ ID NO: 359 - DNA, 2490 bp, synthetic construct
  source 1..2490: mol_type = other DNA
agcataaaagtctcaacacaacatatacaaaacaaacgaatctcaagcaatcaagcattctacttctattgcagcaatttaaatcatttcttttaaagcaaaagcaattttctgaaaattttcaccatttacgaacgatagcgctgccaccatgggctggtcctgcatcatcctgttcctggtggccaccgccaccggcgtgcacgccctgtgggtgaccgtgtactacggcgtgcccgtgtggcgcgaggccaagaccaccctgttctgcgcctccgacgccaagtcctacgagaaggaggtggccaacatctgggccacccacgcctgcgtgcccaccgaccccaacccccaggagctggtgctgaagaacgtgaccgagaacttcaacatgtggaagaacgacatggtggaccagatgcacgaggacatcatctccctgtgggaccagtccctgaagccctgcgtgaagctgacccccctgtgcgtgaccctgcactgctccacctacaacaacacccacaacatctccaaggagatcaagaactgctccttcaacgccaccaccgagctgcgcgacaagcgccgcaaggagtacgccctgttctaccgcctggacatcgtgcccctgaacaagaacggccgccagtaccgcctgatcaactgcaacacctccgtgtgcacccaggtgtgccccaagctgaccttcgaccccatccccatccactactgcgcccccgccggctacgccatcctgaagtgcaacaacaagaccttcaacggcaccggcccctgcaacaacgtgtccaccgtgcagtgcacccacggcatcaagcccgtgctgtccacccagctgctgctgaacggctccctggccgaggaggagatcatcatccgctccgagaacctgaccgacaacgtgaagaccatcatcgtgcacctgaacgagtccgtggagatcaactgcacccgccccaacaacatgacccgcaagtccatccgcatcggccccggccagtggttctacgccctgggcgacatcatcggcgacatccgccagccccactgcaacatctccgagatcaagtggaacaagaccctgcagcgcgtgtccgagaagctgcgcgagcacttcaacaagaccatcatcttcaaccagtcctccggcggcgacctggagatcaccacccactccttcaactgcggcggcgagttcttctactgcaacacctccgacctgttcttcaacaagaccttcaacgagacctactccaccggctccaactccaccaactccaacatcaccctgccctgccgcatcaagcagatcatcaacatgtggcaggaggtgggccgctgcatgtacgccccccccatcgccggcaacatcacctgcaagtccaacatcaccggcctgctgctgacccgcgacggcggcggcaacaactccaccgaggagaccttccgccccggcggcggcaacatgcgcgacaactggcgctccgagctgtacaagtacaaggtggtggaggtgaagcccctgggcatcgcccccaccgagtgccgccgccgcgtggtgcagggcggcggcggctccggcggcggcggctccgccgtggtgggcctgggcgccgtgttcctgggcttcctgggcaccgccggctccaccatgggcgccgcctccatgaccctgaccgtgcaggcccgccagctgctgggctccgccggctccgccggctccggctccgccggctccggctccgccggctccggctccgccggctccaccgtgtggggcttcaagcagctgcaggcccgcgtgctggccatcgagcgctacctggaggtgcagcagctgctgggcatgtggggctgctccggcaagctgatctgctgcaccaacgtgccctggaactcctcctggtccaacaagacctacaacgagatctgggacaacatgacctggatgcagtgggaccgcgagatcggcaactacaccgacaccatctacaagctgctggaggtgtcccagttccagcaggagaagaacgagcaggacctgctggccctggactcctggaacaacctgtggaactggttcgacatctccaagtggctgtggtacatcaagatcttcatcatgatcgtgggcggcctgatcggcctgcgcatcatcttcgccgtgctgtccctggtgaaccgcgtgcgccagggcatctaataaactagtagtgactgactaggatctggttaccactaaaccagcctcaagaacacccgaatggagtctctaagctacataataccaacttacacttacaaaatgttgtcccccaaaatgtagccattcgtatctgctcctaataaaaagaaagtttcttcacattctaaaaaaaaaaaaaaaaaaaaaaaaaaaaaaaaaaaaaaaaaaaaaaaaaaaaaaaaaaaaaaaaaaaaaaaaaaaaaaaaaaaaaaaaaaaaaaaaaaaaa

SEQ ID NO: 360 - DNA, 2619 bp, synthetic construct
  source 1..2619: mol_type = other DNA
agcataaaagtctcaacacaacatatacaaaacaaacgaatctcaagcaatcaagcattctacttctattgcagcaatttaaatcatttcttttaaagcaaaagcaattttctgaaaattttcaccatttacgaacgatagcgctgccaccatgggctggtcctgcatcatcctgttcctggtggccaccgccaccggcgtgcacgccctgtgggtgaccgtgtactacggcgtgcccgtgtggcgcgaggccaagaccaccctgttctgcgcctccgacgccaagtcctacgagaaggaggtgcacaacatctgggccacccacgcctgcgtgcccaccgaccccaacccccaggagctggtgctgaagaacgtgaccgagaacttcaacatgtggaagaacgacatggtggaccagatgcacgaggacatcatctccctgtgggaccagtccctgaagccctgcgtgaagctgacccccctgtgcgtgaccctgcactgctccacctacaacaacacccacaacatctccaaggagatcaagaactgctccttcaacgccaccaccgagctgcgcgacaagcgccgcaaggagtacgccctgttctaccgcctggacatcgtgcccctgaacaagaacggccgccagtaccgcctgatcaactgcaacacctccgtgatcacccaggtgtgccccaagctgaccttcgaccccatccccatccactactgcgcccccgccggctacgccatcctgaagtgcaacaacaagaccttcaacggcaccggcccctgcaacaacgtgtccaccgtgcagtgcacccacggcatcaagcccgtgctgtccacccagctgctgctgaacggctccctggccgaggaggagatcatcatccgctccgagaacctgaccgacaacgtgaagaccatcatcgtgcacctgaacgagtccgtggagatcaactgcacccgccccaacaacaacacccgcaagtccatccgcatcggccccggccagaccttctacgccaccggcgacatcatcggcgacatccgccaggcccactgcaacatctccgagatcaagtggaacaagaccctgcagcgcgtgtccgagaagctgcgcgagcacttcaacaagaccatcatcttcaaccagtcctccggcggcgacctggagatcaccacccactccttcaactgcggcggcgagttcttctactgcaacacctccgacctgttcttcaacaagaccttcaacgagacctactccaccggctccaactccaccaactccaacatcaccctgccctgccgcatcaagcagatcatcaacatgtggcaggaggtgggccgcgccatgtacgcctcccccatcgccggcgagatcacctgcaagtccaacatcaccggcctgctgctgacccgcgacggcggcggcaacaactccaccgaggagaccttccgccccggcggcggcaacatgcgcgacaactggcgctccgagctgtacaagtacaaggtggtggaggtgaagcccctgggcatcgcccccaccgagtgccgccgccgcgtggtgcagggcggcggcggctccggcggcggcggctccgccgtggtgggcctgggcgccgtgttcctgggcttcctgggcaccgccggctccaccatgggcgccgcctccatgaccctgaccgtgcaggcccgccagctgctgggctccgccggctccgccggctccggctccgccggctccggctccgccggctccggctccgccggctccaccgtgtggggcatcaagcagctgcaggcccgcgtgctggccatcgagcgctacctgaaggaccagcagctgctgggcatgtggggctgctccggcaagctgatctgctgcaccaacgtgtactggaactcctcctggtccaacaagacctacaacgagatctgggacaacatgacctggatgcagtgggaccgcgagatcgacaactacaccgacaccatctacaagctgctggaggtgtcccagaagcagcaggagtccaacgagaaggacctgctggccctggactcctggaacaacctgtggaactggttcgacatctccaagtggctgtggtacatcaagatcttcatcatgatcgtgggcggcctgatcggcctgcgcatcatcttcgccgtgctgtccctggtgaaccgcgtgcgccagggcatctcccccctgtccttccagaccctgacccccaacccccgcgagctggaccgcctgggcggcatcgaggaggagggcggcgagcaggaccgcgaccgctccatccgcctggtgtccggcttcttctccctgtaataaactagtagtgactgactaggatctggttaccactaaaccagcctcaagaacacccgaatggagtctctaagctacataataccaacttacacttacaaaatgttgtcccccaaaatgtagccattcgtatctgctcctaataaaaagaaagtttcttcacattctaaaaaaaaaaaaaaaaaaaaaaaaaaaaaaaaaaaaaaaaaaaaaaaaaaaaaaaaaaaaaaaaaaaaaaaaaaaaaaaaaaaaaaaaaaaaaaaaaaaaa

SEQ ID NO: 361 - DNA, 2619 bp, synthetic construct
  source 1..2619: mol_type = other DNA
agcataaaagtctcaacacaacatatacaaaacaaacgaatctcaagcaatcaagcattctacttctattgcagcaatttaaatcatttcttttaaagcaaaagcaattttctgaaaattttcaccatttacgaacgatagcgctgccaccatgggctggtcctgcatcatcctgttcctggtggccaccgccaccggcgtgcacgccctgtgggtgaccgtgtactacggcgtgcccgtgtggcgcgaggccaagaccaccctgttctgcgcctccgacgccaagtcctacgagaaggaggtgcacaacatctgggccacccacgcctgcgtgcccaccgaccccaacccccaggagctggtgctgaagaacgtgaccgagaacttcaacatgtggaagaacgacatggtggaccagatgcacgaggacatcatctccctgtgggaccagtccctgaagccctgcgtgaagctgacccccctgtgcgtgaccctgcactgctccacctacaacaacacccacaacatctccaaggagatcaagaactgctccttcaacgccaccaccgagctgcgcgacaagcgccgcaaggagtacgccctgttctaccgcctggacatcgtgcccctgaacaagaacggccgccagtaccgcctgatcaactgcaacacctccgtgtgcacccaggtgtgccccaagctgaccttcgaccccatccccatccactactgcgcccccgccggctacgccatcctgaagtgcaacaacaagaccttcaacggcaccggcccctgcaacaacgtgtccaccgtgcagtgcacccacggcatcaagcccgtgctgtccacccagctgctgctgaacggctccctggccgaggaggagatcatcatccgctccgagaacctgaccgacaacgtgaagaccatcatcgtgcacctgaacgagtccgtggagatcaactgcacccgccccaacaacaacacccgcaagtccatccgcatcggccccggccagaccttctacgccaccggcgacatcatcggcgacatccgccaggcccactgcaacatctccgagatcaagtggaacaagaccctgcagcgcgtgtccgagaagctgcgcgagcacttcaacaagaccatcatcttcaaccagtcctccggcggcgacctggagatcaccacccactccttcaactgcggcggcgagttcttctactgcaacacctccgacctgttcttcaacaagaccttcaacgagacctactccaccggctccaactccaccaactccaacatcaccctgccctgccgcatcaagcagatcatcaacatgtggcaggaggtgggccgctgcatgtacgcctcccccatcgccggcgagatcacctgcaagtccaacatcaccggcctgctgctgacccgcgacggcggcggcaacaactccaccgaggagaccttccgccccggcggcggcaacatgcgcgacaactggcgctccgagctgtacaagtacaaggtggtggaggtgaagcccctgggcatcgcccccaccgagtgccgccgccgcgtggtgcagggcggcggcggctccggcggcggcggctccgccgtggtgggcctgggcgccgtgttcctgggcttcctgggcaccgccggctccaccatgggcgccgcctccatgaccctgaccgtgcaggcccgccagctgctgggctccgccggctccgccggctccggctccgccggctccggctccgccggctccggctccgccggctccaccgtgtggggcatcaagcagctgcaggcccgcgtgctggccatcgagcgctacctgaaggaccagcagctgctgggcatgtggggctgctccggcaagctgatctgctgcaccaacgtgtactggaactcctcctggtccaacaagacctacaacgagatctgggacaacatgacctggatgcagtgggaccgcgagatcgacaactacaccgacaccatctacaagctgctggaggtgtcccagaagcagcaggagtccaacgagaaggacctgctggccctggactcctggaacaacctgtggaactggttcgacatctccaagtggctgtggtacatcaagatcttcatcatgatcgtgggcggcctgatcggcctgcgcatcatcttcgccgtgctgtccctggtgaaccgcgtgcgccagggcatctcccccctgtccttccagaccctgacccccaacccccgcgagctggaccgcctgggcggcatcgaggaggagggcggcgagcaggaccgcgaccgctccatccgcctggtgtccggcttcttctccctgtaataaactagtagtgactgactaggatctggttaccactaaaccagcctcaagaacacccgaatggagtctctaagctacataataccaacttacacttacaaaatgttgtcccccaaaatgtagccattcgtatctgctcctaataaaaagaaagtttcttcacattctaaaaaaaaaaaaaaaaaaaaaaaaaaaaaaaaaaaaaaaaaaaaaaaaaaaaaaaaaaaaaaaaaaaaaaaaaaaaaaaaaaaaaaaaaaaaaaaaaaaaa

SEQ ID NO: 362 - DNA, 2619 bp, synthetic construct
  source 1..2619: mol_type = other DNA
agcataaaagtctcaacacaacatatacaaaacaaacgaatctcaagcaatcaagcattctacttctattgcagcaatttaaatcatttcttttaaagcaaaagcaattttctgaaaattttcaccatttacgaacgatagcgctgccaccatgggctggtcctgcatcatcctgttcctggtggccaccgccaccggcgtgcacgccctgtgggtgaccgtgtactacggcgtgcccgtgtggcgcgaggccaagaccaccctgttctgcgcctccgacgccaagtcctacgagaaggaggtgcacaacatctgggccacccacgcctgcgtgcccaccgaccccaacccccaggagctggtgctgaagaacgtgaccgagaacttcaacatgtggaagaacgacatggtggaccagatgcacgaggacatcatctccctgtgggaccagtccctgaagccctgcgtgaagctgacccccctgtgcgtgaccctgcactgctccacctacaacaacacccacaacatctccaaggagatcaagaactgctccttcaacgccaccaccgagctgcgcgacaagcgccgcaaggagtacgccctgttctaccgcctggacatcgtgcccctgaacaagaacggccgccagtaccgcctgatcaactgcaacacctccgtgtgcacccaggtgtgccccaagctgaccttcgaccccatccccatccactactgcgcccccgccggctacgccatcctgaagtgcaacaacaagaccttcaacggcaccggcccctgcaacaacgtgtccaccgtgcagtgcacccacggcatcaagcccgtgctgtccacccagctgctgctgaacggctccctggccgaggaggagatcatcatccgctccgagaacctgaccgacaacgtgaagaccatcatcgtgcacctgaacgagtccgtggagatcaactgcacccgccccaacaacaacatgcgcaagtccatccgcatcggccccggccagaccttctacgccctgggcgacatcatcggcgacatccgccagccccactgcaacatctccgagatcaagtggaacaagaccctgcagcgcgtgtccgagaagctgcgcgagcacttcaacaagaccatcatcttcaaccagtcctccggcggcgacctggagatcaccacccactccttcaactgcggcggcgagttcttctactgcaacacctccgacctgttcttcaacaagaccttcaacgagacctactccaccggctccaactccaccaactccaacatcaccctgccctgccgcatcaagcagatcatcaacatgtggcaggaggtgggccgctgcatgtacgccccccccatcgccggcaacatcacctgcaagtccaacatcaccggcctgctgctgacccgcgacggcggcggcaacaactccaccgaggagaccttccgccccggcggcggcaacatgcgcgacaactggcgctccgagctgtacaagtacaaggtggtggaggtgaagcccctgggcatcgcccccaccgagtgccgccgccgcgtggtgcagggcggcggcggctccggcggcggcggctccgccgtggtgggcctgggcgccgtgttcctgggcttcctgggcaccgccggctccaccatgggcgccgcctccatgaccctgaccgtgcaggcccgccagctgctgggctccgccggctccgccggctccggctccgccggctccggctccgccggctccggctccgccggctccaccgtgtggggcttcaagcagctgcaggcccgcgtgctggccatcgagcgctacctggaggtgcagcagctgctgggcatgtggggctgctccggcaagctgatctgctgcaccaacgtgccctggaactcctcctggtccaacaagacctacaacgagatctgggacaacatgacctggatgcagtgggaccgcgagatcggcaactacaccgacaccatctacaagctgctggaggtgtcccagttccagcaggagatcaacgagaaggacctgctggccctggactcctggaacaacctgtggaactggttcgacatctccaagtggctgtggtacatcaagatcttcatcatgatcgtgggcggcctgatcggcctgcgcatcatcttcgccgtgctgtccctggtgaaccgcgtgcgccagggcatctcccccctgtccttccagaccctgacccccaacccccgcgagctggaccgcctgggcggcatcgaggaggagggcggcgagcaggaccgcgaccgctccatccgcctggtgtccggcttcttctccctgtaataaactagtagtgactgactaggatctggttaccactaaaccagcctcaagaacacccgaatggagtctctaagctacataataccaacttacacttacaaaatgttgtcccccaaaatgtagccattcgtatctgctcctaataaaaagaaagtttcttcacattctaaaaaaaaaaaaaaaaaaaaaaaaaaaaaaaaaaaaaaaaaaaaaaaaaaaaaaaaaaaaaaaaaaaaaaaaaaaaaaaaaaaaaaaaaaaaaaaaaaaaa

SEQ ID NO: 363 - DNA, 2619 bp, synthetic construct
  source 1..2619: mol_type = other DNA
agcataaaagtctcaacacaacatatacaaaacaaacgaatctcaagcaatcaagcattctacttctattgcagcaatttaaatcatttcttttaaagcaaaagcaattttctgaaaattttcaccatttacgaacgatagcgctgccaccatgggctggtcctgcatcatcctgttcctggtggccaccgccaccggcgtgcacgccctgtgggtgaccgtgtactacggcgtgcccgtgtggcgcgaggccaagaccaccctgttctgcgcctccgacgccaagtcctacgagaaggaggtggccaacatctgggccacccacgcctgcgtgcccaccgaccccaacccccaggagctggtgctgaagaacgtgaccgagaacttcaacatgtggaagaacgacatggtggaccagatgcacgaggacatcatctccctgtgggaccagtccctgaagccctgcgtgaagctgacccccctgtgcgtgaccctgcactgctccacctacaacaacacccacaacatctccaaggagatcaagaactgctccttcaacgccaccaccgagctgcgcgacaagcgccgcaaggagtacgccctgttctaccgcctggacatcgtgcccctgaacaagaacggccgccagtaccgcctgatcaactgcaacacctccgtgtgcacccaggtgtgccccaagctgaccttcgaccccatccccatccactactgcgcccccgccggctacgccatcctgaagtgcaacaacaagaccttcaacggcaccggcccctgcaacaacgtgtccaccgtgcagtgcacccacggcatcaagcccgtgctgtccacccagctgctgctgaacggctccctggccgaggaggagatcatcatccgctccgagaacctgaccgacaacgtgaagaccatcatcgtgcacctgaacgagtccgtggagatcaactgcacccgccccaacaacaacacccgcaagtccatccgcatcggccccggccagtggttctacgccaccggcgacatcatcggcgacatccgccaggcccactgcaacatctccgagatcaagtggaacaagaccctgcagcgcgtgtccgagaagctgcgcgagcacttcaacaagaccatcatcttcaaccagtcctccggcggcgacctggagatcaccacccactccttcaactgcggcggcgagttcttctactgcaacacctccgacctgttcttcaacaagaccttcaacgagacctactccaccggctccaactccaccaactccaacatcaccctgccctgccgcatcaagcagatcatcaacatgtggcaggaggtgggccgctgcatgtacgcctcccccatcgccggcgagatcacctgcaagtccaacatcaccggcctgctgctgacccgcgacggcggcggcaacaactccaccgaggagaccttccgccccggcggcggcaacatgcgcgacaactggcgctccgagctgtacaagtacaaggtggtggaggtgaagcccctgggcatcgcccccaccgagtgccgccgccgcgtggtgcagggcggcggcggctccggcggcggcggctccgccgtggtgggcctgggcgccgtgttcctgggcttcctgggcaccgccggctccaccatgggcgccgcctccatgaccctgaccgtgcaggcccgccagctgctgggctccgccggctccgccggctccggctccgccggctccggctccgccggctccggctccgccggctccaccgtgtggggcatcaagcagctgcaggcccgcgtgctggccatcgagcgctacctgaaggaccagcagctgctgggcatgtggggctgctccggcaagctgatctgctgcaccaacgtgtactggaactcctcctggtccaacaagacctacaacgagatctgggacaacatgacctggatgcagtgggaccgcgagatcgacaactacaccgacaccatctacaagctgctggaggtgtcccagaagcagcaggagaagaacgagcaggacctgctggccctggactcctggaacaacctgtggaactggttcgacatctccaagtggctgtggtacatcaagatcttcatcatgatcgtgggcggcctgatcggcctgcgcatcatcttcgccgtgctgtccctggtgaaccgcgtgcgccagggcatctcccccctgtccttccagaccctgacccccaacccccgcgagctggaccgcctgggcggcatcgaggaggagggcggcgagcaggaccgcgaccgctccatccgcctggtgtccggcttcttctccctgtaataaactagtagtgactgactaggatctggttaccactaaaccagcctcaagaacacccgaatggagtctctaagctacataataccaacttacacttacaaaatgttgtcccccaaaatgtagccattcgtatctgctcctaataaaaagaaagtttcttcacattctaaaaaaaaaaaaaaaaaaaaaaaaaaaaaaaaaaaaaaaaaaaaaaaaaaaaaaaaaaaaaaaaaaaaaaaaaaaaaaaaaaaaaaaaaaaaaaaaaaaaa

SEQ ID NO: 364 - DNA, 2619 bp, synthetic construct
  source 1..2619: mol_type = other DNA
agcataaaagtctcaacacaacatatacaaaacaaacgaatctcaagcaatcaagcattctacttctattgcagcaatttaaatcatttcttttaaagcaaaagcaattttctgaaaattttcaccatttacgaacgatagcgctgccaccatgggctggtcctgcatcatcctgttcctggtggccaccgccaccggcgtgcacgccctgtgggtgaccgtgtactacggcgtgcccgtgtggcgcgaggccaagaccaccctgttctgcgcctccgacgccaagtcctacgagaaggaggtggccaacatctgggccacccacgcctgcgtgcccaccgaccccaacccccaggagctggtgctgaagaacgtgaccgagaacttcaacatgtggaagaacgacatggtggaccagatgcacgaggacatcatctccctgtgggaccagtccctgaagccctgcgtgaagctgacccccctgtgcgtgaccctgcactgctccacctacaacaacacccacaacatctccaaggagatcaagaactgctccttcaacgccaccaccgagctgcgcgacaagcgccgcaaggagtacgccctgttctaccgcctggacatcgtgcccctgaacaagaacggccgccagtaccgcctgatcaactgcaacacctccgtgtgcacccaggtgtgccccaagctgaccttcgaccccatccccatccactactgcgcccccgccggctacgccatcctgaagtgcaacaacaagaccttcaacggcaccggcccctgcaacaacgtgtccaccgtgcagtgcacccacggcatcaagcccgtgctgtccacccagctgctgctgaacggctccctggccgaggaggagatcatcatccgctccgagaacctgaccgacaacgtgaagaccatcatcgtgcacctgaacgagtccgtggagatcaactgcacccgccccaacaacatgacccgcaagtccatccgcatcggccccggccagtggttctacgccctgggcgacatcatcggcgacatccgccagccccactgcaacatctccgagatcaagtggaacaagaccctgcagcgcgtgtccgagaagctgcgcgagcacttcaacaagaccatcatcttcaaccagtcctccggcggcgacctggagatcaccacccactccttcaactgcggcggcgagttcttctactgcaacacctccgacctgttcttcaacaagaccttcaacgagacctactccaccggctccaactccaccaactccaacatcaccctgccctgccgcatcaagcagatcatcaacatgtggcaggaggtgggccgctgcatgtacgccccccccatcgccggcaacatcacctgcaagtccaacatcaccggcctgctgctgacccgcgacggcggcggcaacaactccaccgaggagaccttccgccccggcggcggcaacatgcgcgacaactggcgctccgagctgtacaagtacaaggtggtggaggtgaagcccctgggcatcgcccccaccgagtgccgccgccgcgtggtgcagggcggcggcggctccggcggcggcggctccgccgtggtgggcctgggcgccgtgttcctgggcttcctgggcaccgccggctccaccatgggcgccgcctccatgaccctgaccgtgcaggcccgccagctgctgggctccgccggctccgccggctccggctccgccggctccggctccgccggctccggctccgccggctccaccgtgtggggcttcaagcagctgcaggcccgcgtgctggccatcgagcgctacctggaggtgcagcagctgctgggcatgtggggctgctccggcaagctgatctgctgcaccaacgtgccctggaactcctcctggtccaacaagacctacaacgagatctgggacaacatgacctggatgcagtgggaccgcgagatcggcaactacaccgacaccatctacaagctgctggaggtgtcccagttccagcaggagaagaacgagcaggacctgctggccctggactcctggaacaacctgtggaactggttcgacatctccaagtggctgtggtacatcaagatcttcatcatgatcgtgggcggcctgatcggcctgcgcatcatcttcgccgtgctgtccctggtgaaccgcgtgcgccagggcatctcccccctgtccttccagaccctgacccccaacccccgcgagctggaccgcctgggcggcatcgaggaggagggcggcgagcaggaccgcgaccgctccatccgcctggtgtccggcttcttctccctgtaataaactagtagtgactgactaggatctggttaccactaaaccagcctcaagaacacccgaatggagtctctaagctacataataccaacttacacttacaaaatgttgtcccccaaaatgtagccattcgtatctgctcctaataaaaagaaagtttcttcacattctaaaaaaaaaaaaaaaaaaaaaaaaaaaaaaaaaaaaaaaaaaaaaaaaaaaaaaaaaaaaaaaaaaaaaaaaaaaaaaaaaaaaaaaaaaaaaaaaaaaaa

SEQ ID NO: 365 - DNA, 2604 bp, synthetic construct
  source 1..2604: mol_type = other DNA
agcataaaagtctcaacacaacatatacaaaacaaacgaatctcaagcaatcaagcattctacttctattgcagcaatttaaatcatttcttttaaagcaaaagcaattttctgaaaattttcaccatttacgaacgatagcgctgccaccatgggctggtcctgcatcatcctgttcctggtggccaccgccaccggcgtgcacgccctgtgggtgaccgtgtactacggcgtgcccgtgtggcgcgaggccaagaccaccctgttctgcgcctccgacgccaagtcctacgagaaggaggtgcacaacatctgggccacccacgcctgcgtgcccaccgaccccaacccccaggagctggtgctgaagaacgtgaccgagaacttcaacatgtggaagaacgacatggtggaccagatgcacgaggacatcatctccctgtgggaccagtccctgaagccctgcgtgaagctgacccccctgtgcgtgaccctgcactgctccacctacaacaacacccacaacatctccaaggagatcaagaactgctccttcaacgccaccaccgagctgcgcgacaagcgccgcaaggagtacgccctgttctaccgcctggacatcgtgcccctgaacaagaacggccgccagtaccgcctgatcaactgcaacacctccgtgatcacccaggtgtgccccaagctgaccttcgaccccatccccatccactactgcgcccccgccggctacgccatcctgaagtgcaacaacaagaccttcaacggcaccggcccctgcaacaacgtgtccaccgtgcagtgcacccacggcatcaagcccgtgctgtccacccagctgctgctgaacggctccctggccgaggaggagatcatcatccgctccgagaacctgaccgacaacgtgaagaccatcatcgtgcacctgaacgagtccgtggagatcaactgcacccgccccaacaacaacacccgcaagtccatccgcatcggccccggccagaccttctacgccaccggcgacatcatcggcgacatccgccaggcccactgcaacatctccgagatcaagtggaacaagaccctgcagcgcgtgtccgagaagctgcgcgagcacttcaacaagaccatcatcttcaaccagtcctccggcggcgacctggagatcaccacccactccttcaactgcggcggcgagttcttctactgcaacacctccgacctgttcttcaacaagaccttcaacgagacctactccaccggctccaactccaccaactccaacatcaccctgccctgccgcatcaagcagatcatcaacatgtggcaggaggtgggccgcgccatgtacgcctcccccatcgccggcgagatcacctgcaagtccaacatcaccggcctgctgctgacccgcgacggcggcggcaacaactccaccgaggagaccttccgccccggcggcggcaacatgcgcgacaactggcgctccgagctgtacaagtacaaggtggtggaggtgaagcccctgggcatcgcccccaccgagtgccgccgccgcgtggtgcagggcggcggcggctccggcggcggcggctccgccgtggtgggcctgggcgccgtgttcctgggcttcctgggcaccgccggctccaccatgggcgccgcctccatgaccctgaccgtgcaggcccgccagctgctgggctccgccggctccgccggctccggctccgccggctccggctccgccggctccggctccgccggctccaccgtgtggggcatcaagcagctgcaggcccgcgtgctggccatcgagcgctacctgaaggaccagcagctgctgggcatgtggggctgctccggcaagctgatctgctgcaccaacgtgtactggaactcctcctggtccaacaagacctacaacgagatctgggacaacatgacctggatgcagtgggaccgcgagatcgacaactacaccgacaccatctacaagctgctggaggtgtcccagaagcagcaggagtccaacgagaaggacctgctggccctggactcctggaacaacctgtggaactggttcgacatctccaagtggctgtggtacatcaagatcttcatcatgatcgtgggcggcctgatcggcctgcgcatcatcttcgccgtgctgtccctggtgaaccgcgtgcgccagggcatctcccccctgtccttccagaccctgacccccaacccccgcgagctggaccgcctgggcggcatcgaggaggagggcggcgagcaggaccgcgaccgctccatccgcctggtgtcctaataaactagtagtgactgactaggatctggttaccactaaaccagcctcaagaacacccgaatggagtctctaagctacataataccaacttacacttacaaaatgttgtcccccaaaatgtagccattcgtatctgctcctaataaaaagaaagtttcttcacattctaaaaaaaaaaaaaaaaaaaaaaaaaaaaaaaaaaaaaaaaaaaaaaaaaaaaaaaaaaaaaaaaaaaaaaaaaaaaaaaaaaaaaaaaaaaaaaaaaaaaa

SEQ ID NO: 366 - DNA, 2604 bp, synthetic construct
  source 1..2604: mol_type = other DNA
agcataaaagtctcaacacaacatatacaaaacaaacgaatctcaagcaatcaagcattctacttctattgcagcaatttaaatcatttcttttaaagcaaaagcaattttctgaaaattttcaccatttacgaacgatagcgctgccaccatgggctggtcctgcatcatcctgttcctggtggccaccgccaccggcgtgcacgccctgtgggtgaccgtgtactacggcgtgcccgtgtggcgcgaggccaagaccaccctgttctgcgcctccgacgccaagtcctacgagaaggaggtgcacaacatctgggccacccacgcctgcgtgcccaccgaccccaacccccaggagctggtgctgaagaacgtgaccgagaacttcaacatgtggaagaacgacatggtggaccagatgcacgaggacatcatctccctgtgggaccagtccctgaagccctgcgtgaagctgacccccctgtgcgtgaccctgcactgctccacctacaacaacacccacaacatctccaaggagatcaagaactgctccttcaacgccaccaccgagctgcgcgacaagcgccgcaaggagtacgccctgttctaccgcctggacatcgtgcccctgaacaagaacggccgccagtaccgcctgatcaactgcaacacctccgtgtgcacccaggtgtgccccaagctgaccttcgaccccatccccatccactactgcgcccccgccggctacgccatcctgaagtgcaacaacaagaccttcaacggcaccggcccctgcaacaacgtgtccaccgtgcagtgcacccacggcatcaagcccgtgctgtccacccagctgctgctgaacggctccctggccgaggaggagatcatcatccgctccgagaacctgaccgacaacgtgaagaccatcatcgtgcacctgaacgagtccgtggagatcaactgcacccgccccaacaacaacacccgcaagtccatccgcatcggccccggccagaccttctacgccaccggcgacatcatcggcgacatccgccaggcccactgcaacatctccgagatcaagtggaacaagaccctgcagcgcgtgtccgagaagctgcgcgagcacttcaacaagaccatcatcttcaaccagtcctccggcggcgacctggagatcaccacccactccttcaactgcggcggcgagttcttctactgcaacacctccgacctgttcttcaacaagaccttcaacgagacctactccaccggctccaactccaccaactccaacatcaccctgccctgccgcatcaagcagatcatcaacatgtggcaggaggtgggccgctgcatgtacgcctcccccatcgccggcgagatcacctgcaagtccaacatcaccggcctgctgctgacccgcgacggcggcggcaacaactccaccgaggagaccttccgccccggcggcggcaacatgcgcgacaactggcgctccgagctgtacaagtacaaggtggtggaggtgaagcccctgggcatcgcccccaccgagtgccgccgccgcgtggtgcagggcggcggcggctccggcggcggcggctccgccgtggtgggcctgggcgccgtgttcctgggcttcctgggcaccgccggctccaccatgggcgccgcctccatgaccctgaccgtgcaggcccgccagctgctgggctccgccggctccgccggctccggctccgccggctccggctccgccggctccggctccgccggctccaccgtgtggggcatcaagcagctgcaggcccgcgtgctggccatcgagcgctacctgaaggaccagcagctgctgggcatgtggggctgctccggcaagctgatctgctgcaccaacgtgtactggaactcctcctggtccaacaagacctacaacgagatctgggacaacatgacctggatgcagtgggaccgcgagatcgacaactacaccgacaccatctacaagctgctggaggtgtcccagaagcagcaggagtccaacgagaaggacctgctggccctggactcctggaacaacctgtggaactggttcgacatctccaagtggctgtggtacatcaagatcttcatcatgatcgtgggcggcctgatcggcctgcgcatcatcttcgccgtgctgtccctggtgaaccgcgtgcgccagggcatctcccccctgtccttccagaccctgacccccaacccccgcgagctggaccgcctgggcggcatcgaggaggagggcggcgagcaggaccgcgaccgctccatccgcctggtgtcctaataaactagtagtgactgactaggatctggttaccactaaaccagcctcaagaacacccgaatggagtctctaagctacataataccaacttacacttacaaaatgttgtcccccaaaatgtagccattcgtatctgctcctaataaaaagaaagtttcttcacattctaaaaaaaaaaaaaaaaaaaaaaaaaaaaaaaaaaaaaaaaaaaaaaaaaaaaaaaaaaaaaaaaaaaaaaaaaaaaaaaaaaaaaaaaaaaaaaaaaaaaa

SEQ ID NO: 367 - DNA, 2604 bp, synthetic construct
  source 1..2604: mol_type = other DNA
agcataaaagtctcaacacaacatatacaaaacaaacgaatctcaagcaatcaagcattctacttctattgcagcaatttaaatcatttcttttaaagcaaaagcaattttctgaaaattttcaccatttacgaacgatagcgctgccaccatgggctggtcctgcatcatcctgttcctggtggccaccgccaccggcgtgcacgccctgtgggtgaccgtgtactacggcgtgcccgtgtggcgcgaggccaagaccaccctgttctgcgcctccgacgccaagtcctacgagaaggaggtgcacaacatctgggccacccacgcctgcgtgcccaccgaccccaacccccaggagctggtgctgaagaacgtgaccgagaacttcaacatgtggaagaacgacatggtggaccagatgcacgaggacatcatctccctgtgggaccagtccctgaagccctgcgtgaagctgacccccctgtgcgtgaccctgcactgctccacctacaacaacacccacaacatctccaaggagatcaagaactgctccttcaacgccaccaccgagctgcgcgacaagcgccgcaaggagtacgccctgttctaccgcctggacatcgtgcccctgaacaagaacggccgccagtaccgcctgatcaactgcaacacctccgtgtgcacccaggtgtgccccaagctgaccttcgaccccatccccatccactactgcgcccccgccggctacgccatcctgaagtgcaacaacaagaccttcaacggcaccggcccctgcaacaacgtgtccaccgtgcagtgcacccacggcatcaagcccgtgctgtccacccagctgctgctgaacggctccctggccgaggaggagatcatcatccgctccgagaacctgaccgacaacgtgaagaccatcatcgtgcacctgaacgagtccgtggagatcaactgcacccgccccaacaacaacatgcgcaagtccatccgcatcggccccggccagaccttctacgccctgggcgacatcatcggcgacatccgccagccccactgcaacatctccgagatcaagtggaacaagaccctgcagcgcgtgtccgagaagctgcgcgagcacttcaacaagaccatcatcttcaaccagtcctccggcggcgacctggagatcaccacccactccttcaactgcggcggcgagttcttctactgcaacacctccgacctgttcttcaacaagaccttcaacgagacctactccaccggctccaactccaccaactccaacatcaccctgccctgccgcatcaagcagatcatcaacatgtggcaggaggtgggccgctgcatgtacgccccccccatcgccggcaacatcacctgcaagtccaacatcaccggcctgctgctgacccgcgacggcggcggcaacaactccaccgaggagaccttccgccccggcggcggcaacatgcgcgacaactggcgctccgagctgtacaagtacaaggtggtggaggtgaagcccctgggcatcgcccccaccgagtgccgccgccgcgtggtgcagggcggcggcggctccggcggcggcggctccgccgtggtgggcctgggcgccgtgttcctgggcttcctgggcaccgccggctccaccatgggcgccgcctccatgaccctgaccgtgcaggcccgccagctgctgggctccgccggctccgccggctccggctccgccggctccggctccgccggctccggctccgccggctccaccgtgtggggcttcaagcagctgcaggcccgcgtgctggccatcgagcgctacctggaggtgcagcagctgctgggcatgtggggctgctccggcaagctgatctgctgcaccaacgtgccctggaactcctcctggtccaacaagacctacaacgagatctgggacaacatgacctggatgcagtgggaccgcgagatcggcaactacaccgacaccatctacaagctgctggaggtgtcccagttccagcaggagatcaacgagaaggacctgctggccctggactcctggaacaacctgtggaactggttcgacatctccaagtggctgtggtacatcaagatcttcatcatgatcgtgggcggcctgatcggcctgcgcatcatcttcgccgtgctgtccctggtgaaccgcgtgcgccagggcatctcccccctgtccttccagaccctgacccccaacccccgcgagctggaccgcctgggcggcatcgaggaggagggcggcgagcaggaccgcgaccgctccatccgcctggtgtcctaataaactagtagtgactgactaggatctggttaccactaaaccagcctcaagaacacccgaatggagtctctaagctacataataccaacttacacttacaaaatgttgtcccccaaaatgtagccattcgtatctgctcctaataaaaagaaagtttcttcacattctaaaaaaaaaaaaaaaaaaaaaaaaaaaaaaaaaaaaaaaaaaaaaaaaaaaaaaaaaaaaaaaaaaaaaaaaaaaaaaaaaaaaaaaaaaaaaaaaaaaaa

SEQ ID NO: 368 - DNA, 2604 bp, synthetic construct
  source 1..2604: mol_type = other DNA
agcataaaagtctcaacacaacatatacaaaacaaacgaatctcaagcaatcaagcattctacttctattgcagcaatttaaatcatttcttttaaagcaaaagcaattttctgaaaattttcaccatttacgaacgatagcgctgccaccatgggctggtcctgcatcatcctgttcctggtggccaccgccaccggcgtgcacgccctgtgggtgaccgtgtactacggcgtgcccgtgtggcgcgaggccaagaccaccctgttctgcgcctccgacgccaagtcctacgagaaggaggtggccaacatctgggccacccacgcctgcgtgcccaccgaccccaacccccaggagctggtgctgaagaacgtgaccgagaacttcaacatgtggaagaacgacatggtggaccagatgcacgaggacatcatctccctgtgggaccagtccctgaagccctgcgtgaagctgacccccctgtgcgtgaccctgcactgctccacctacaacaacacccacaacatctccaaggagatcaagaactgctccttcaacgccaccaccgagctgcgcgacaagcgccgcaaggagtacgccctgttctaccgcctggacatcgtgcccctgaacaagaacggccgccagtaccgcctgatcaactgcaacacctccgtgtgcacccaggtgtgccccaagctgaccttcgaccccatccccatccactactgcgcccccgccggctacgccatcctgaagtgcaacaacaagaccttcaacggcaccggcccctgcaacaacgtgtccaccgtgcagtgcacccacggcatcaagcccgtgctgtccacccagctgctgctgaacggctccctggccgaggaggagatcatcatccgctccgagaacctgaccgacaacgtgaagaccatcatcgtgcacctgaacgagtccgtggagatcaactgcacccgccccaacaacaacacccgcaagtccatccgcatcggccccggccagtggttctacgccaccggcgacatcatcggcgacatccgccaggcccactgcaacatctccgagatcaagtggaacaagaccctgcagcgcgtgtccgagaagctgcgcgagcacttcaacaagaccatcatcttcaaccagtcctccggcggcgacctggagatcaccacccactccttcaactgcggcggcgagttcttctactgcaacacctccgacctgttcttcaacaagaccttcaacgagacctactccaccggctccaactccaccaactccaacatcaccctgccctgccgcatcaagcagatcatcaacatgtggcaggaggtgggccgctgcatgtacgcctcccccatcgccggcgagatcacctgcaagtccaacatcaccggcctgctgctgacccgcgacggcggcggcaacaactccaccgaggagaccttccgccccggcggcggcaacatgcgcgacaactggcgctccgagctgtacaagtacaaggtggtggaggtgaagcccctgggcatcgcccccaccgagtgccgccgccgcgtggtgcagggcggcggcggctccggcggcggcggctccgccgtggtgggcctgggcgccgtgttcctgggcttcctgggcaccgccggctccaccatgggcgccgcctccatgaccctgaccgtgcaggcccgccagctgctgggctccgccggctccgccggctccggctccgccggctccggctccgccggctccggctccgccggctccaccgtgtggggcatcaagcagctgcaggcccgcgtgctggccatcgagcgctacctgaaggaccagcagctgctgggcatgtggggctgctccggcaagctgatctgctgcaccaacgtgtactggaactcctcctggtccaacaagacctacaacgagatctgggacaacatgacctggatgcagtgggaccgcgagatcgacaactacaccgacaccatctacaagctgctggaggtgtcccagaagcagcaggagaagaacgagcaggacctgctggccctggactcctggaacaacctgtggaactggttcgacatctccaagtggctgtggtacatcaagatcttcatcatgatcgtgggcggcctgatcggcctgcgcatcatcttcgccgtgctgtccctggtgaaccgcgtgcgccagggcatctcccccctgtccttccagaccctgacccccaacccccgcgagctggaccgcctgggcggcatcgaggaggagggcggcgagcaggaccgcgaccgctccatccgcctggtgtcctaataaactagtagtgactgactaggatctggttaccactaaaccagcctcaagaacacccgaatggagtctctaagctacataataccaacttacacttacaaaatgttgtcccccaaaatgtagccattcgtatctgctcctaataaaaagaaagtttcttcacattctaaaaaaaaaaaaaaaaaaaaaaaaaaaaaaaaaaaaaaaaaaaaaaaaaaaaaaaaaaaaaaaaaaaaaaaaaaaaaaaaaaaaaaaaaaaaaaaaaaaaa

SEQ ID NO: 369 - DNA, 2604 bp, synthetic construct
  source 1..2604: mol_type = other DNA
agcataaaagtctcaacacaacatatacaaaacaaacgaatctcaagcaatcaagcattctacttctattgcagcaatttaaatcatttcttttaaagcaaaagcaattttctgaaaattttcaccatttacgaacgatagcgctgccaccatgggctggtcctgcatcatcctgttcctggtggccaccgccaccggcgtgcacgccctgtgggtgaccgtgtactacggcgtgcccgtgtggcgcgaggccaagaccaccctgttctgcgcctccgacgccaagtcctacgagaaggaggtggccaacatctgggccacccacgcctgcgtgcccaccgaccccaacccccaggagctggtgctgaagaacgtgaccgagaacttcaacatgtggaagaacgacatggtggaccagatgcacgaggacatcatctccctgtgggaccagtccctgaagccctgcgtgaagctgacccccctgtgcgtgaccctgcactgctccacctacaacaacacccacaacatctccaaggagatcaagaactgctccttcaacgccaccaccgagctgcgcgacaagcgccgcaaggagtacgccctgttctaccgcctggacatcgtgcccctgaacaagaacggccgccagtaccgcctgatcaactgcaacacctccgtgtgcacccaggtgtgccccaagctgaccttcgaccccatccccatccactactgcgcccccgccggctacgccatcctgaagtgcaacaacaagaccttcaacggcaccggcccctgcaacaacgtgtccaccgtgcagtgcacccacggcatcaagcccgtgctgtccacccagctgctgctgaacggctccctggccgaggaggagatcatcatccgctccgagaacctgaccgacaacgtgaagaccatcatcgtgcacctgaacgagtccgtggagatcaactgcacccgccccaacaacatgacccgcaagtccatccgcatcggccccggccagtggttctacgccctgggcgacatcatcggcgacatccgccagccccactgcaacatctccgagatcaagtggaacaagaccctgcagcgcgtgtccgagaagctgcgcgagcacttcaacaagaccatcatcttcaaccagtcctccggcggcgacctggagatcaccacccactccttcaactgcggcggcgagttcttctactgcaacacctccgacctgttcttcaacaagaccttcaacgagacctactccaccggctccaactccaccaactccaacatcaccctgccctgccgcatcaagcagatcatcaacatgtggcaggaggtgggccgctgcatgtacgccccccccatcgccggcaacatcacctgcaagtccaacatcaccggcctgctgctgacccgcgacggcggcggcaacaactccaccgaggagaccttccgccccggcggcggcaacatgcgcgacaactggcgctccgagctgtacaagtacaaggtggtggaggtgaagcccctgggcatcgcccccaccgagtgccgccgccgcgtggtgcagggcggcggcggctccggcggcggcggctccgccgtggtgggcctgggcgccgtgttcctgggcttcctgggcaccgccggctccaccatgggcgccgcctccatgaccctgaccgtgcaggcccgccagctgctgggctccgccggctccgccggctccggctccgccggctccggctccgccggctccggctccgccggctccaccgtgtggggcttcaagcagctgcaggcccgcgtgctggccatcgagcgctacctggaggtgcagcagctgctgggcatgtggggctgctccggcaagctgatctgctgcaccaacgtgccctggaactcctcctggtccaacaagacctacaacgagatctgggacaacatgacctggatgcagtgggaccgcgagatcggcaactacaccgacaccatctacaagctgctggaggtgtcccagttccagcaggagaagaacgagcaggacctgctggccctggactcctggaacaacctgtggaactggttcgacatctccaagtggctgtggtacatcaagatcttcatcatgatcgtgggcggcctgatcggcctgcgcatcatcttcgccgtgctgtccctggtgaaccgcgtgcgccagggcatctcccccctgtccttccagaccctgacccccaacccccgcgagctggaccgcctgggcggcatcgaggaggagggcggcgagcaggaccgcgaccgctccatccgcctggtgtcctaataaactagtagtgactgactaggatctggttaccactaaaccagcctcaagaacacccgaatggagtctctaagctacataataccaacttacacttacaaaatgttgtcccccaaaatgtagccattcgtatctgctcctaataaaaagaaagtttcttcacattctaaaaaaaaaaaaaaaaaaaaaaaaaaaaaaaaaaaaaaaaaaaaaaaaaaaaaaaaaaaaaaaaaaaaaaaaaaaaaaaaaaaaaaaaaaaaaaaaaaaaa

SEQ ID NO: 370 - DNA, 2976 bp, synthetic construct
  source 1..2976: mol_type = other DNA
agcataaaagtctcaacacaacatatacaaaacaaacgaatctcaagcaatcaagcattctacttctattgcagcaatttaaatcatttcttttaaagcaaaagcaattttctgaaaattttcaccatttacgaacgatagcgctgccaccatggactccaagggctcctcccagaagggctcccgcctgctgctgctgctggtggtgtccaacctgctgctgccccagggcgtgctggccctgtgggtgaccgtgtactacggcgtgcccgtgtggcgcgaggccaagaccaccctgttctgcgcctccgacgccaagtcctacgagaaggaggtgcacaacatctgggccacccacgcctgcgtgcccaccgaccccaacccccaggagctggtgctgaagaacgtgaccgagaacttcaacatgtggaagaacgacatggtggaccagatgcacgaggacatcatctccctgtgggaccagtccctgaagccctgcgtgaagctgacccccctgtgcgtgaccctgcactgctccacctacaacaacacccacaacatctccaaggagatcaagaactgctccttcaacgccaccaccgagctgcgcgacaagcgccgcaaggagtacgccctgttctaccgcctggacatcgtgcccctgaacaagaacggccgccagtaccgcctgatcaactgcaacacctccgtgatcacccaggtgtgccccaagctgaccttcgaccccatccccatccactactgcgcccccgccggctacgccatcctgaagtgcaacaacaagaccttcaacggcaccggcccctgcaacaacgtgtccaccgtgcagtgcacccacggcatcaagcccgtgctgtccacccagctgctgctgaacggctccctggccgaggaggagatcatcatccgctccgagaacctgaccgacaacgtgaagaccatcatcgtgcacctgaacgagtccgtggagatcaactgcacccgccccaacaacaacacccgcaagtccatccgcatcggccccggccagaccttctacgccaccggcgacatcatcggcgacatccgccaggcccactgcaacatctccgagatcaagtggaacaagaccctgcagcgcgtgtccgagaagctgcgcgagcacttcaacaagaccatcatcttcaaccagtcctccggcggcgacctggagatcaccacccactccttcaactgcggcggcgagttcttctactgcaacacctccgacctgttcttcaacaagaccttcaacgagacctactccaccggctccaactccaccaactccaacatcaccctgccctgccgcatcaagcagatcatcaacatgtggcaggaggtgggccgcgccatgtacgcctcccccatcgccggcgagatcacctgcaagtccaacatcaccggcctgctgctgacccgcgacggcggcggcaacaactccaccgaggagaccttccgccccggcggcggcaacatgcgcgacaactggcgctccgagctgtacaagtacaaggtggtggaggtgaagcccctgggcatcgcccccaccgagtgccgccgccgcgtggtgcagggcggcggcggctccggcggcggcggctccgccgtggtgggcctgggcgccgtgttcctgggcttcctgggcaccgccggctccaccatgggcgccgcctccatgaccctgaccgtgcaggcccgccagctgctgggctccgccggctccgccggctccggctccgccggctccggctccgccggctccggctccgccggctccaccgtgtggggcatcaagcagctgcaggcccgcgtgctggccatcgagcgctacctgaaggaccagcagctgctgggcatgtggggctgctccggcaagctgatctgctgcaccaacgtgtactggaactcctcctggtccaacaagacctacaacgagatctgggacaacatgacctggatgcagtgggaccgcgagatcgacaactacaccgacaccatctacaagctgctggaggtgtcccagaagcagcaggagtccaacgagaaggacctgctggccctggactcctggaacaacctgtggaactggttcgacatctccaagtggctgtggtacatcaagatcttcatcatgatcgtgggcggcctgatcggcctgcgcatcatcttcgccgtgctgtccctggtgaaccgcgtgcgccagggcatctcccccctgtccttccagaccctgacccccaacccccgcgagctggaccgcctgggcggcatcgaggaggagggcggcgagcaggaccgcgaccgctccatccgcctggtgtccggcttcttctccctggcctggaacgacctgcgctccctgtgcctgttctgctaccaccgcctgcgcgacttcatcctgatcgccggccgcgccgtggagctgctgggccgctcctccctgcagggcctgcagcgcggctgggagatcctgaagtacctgggctccctggtgcagtactggggcctggagctgaagaagtccgccatcaacctgttcgacaccatcgccatcgccgtggccgagggcaccgaccgcatcatcgagttcctgcagcgcatcgtgcgcgccatcctgcacatcccccgccgcatccgccagggcttcgaggccgccctgcagtaataaactagtagtgactgactaggatctggttaccactaaaccagcctcaagaacacccgaatggagtctctaagctacataataccaacttacacttacaaaatgttgtcccccaaaatgtagccattcgtatctgctcctaataaaaagaaagtttcttcacattctaaaaaaaaaaaaaaaaaaaaaaaaaaaaaaaaaaaaaaaaaaaaaaaaaaaaaaaaaaaaaaaaaaaaaaaaaaaaaaaaaaaaaaaaaaaaaaaaaaaaa

SEQ ID NO: 371 - DNA, 2523 bp, synthetic construct
  source 1..2523: mol_type = other DNA
agcataaaagtctcaacacaacatatacaaaacaaacgaatctcaagcaatcaagcattctacttctattgcagcaatttaaatcatttcttttaaagcaaaagcaattttctgaaaattttcaccatttacgaacgatagcgctgccaccatggactccaagggctcctcccagaagggctcccgcctgctgctgctgctggtggtgtccaacctgctgctgccccagggcgtgctggccctgtgggtgaccgtgtactacggcgtgcccgtgtggcgcgaggccaagaccaccctgttctgcgcctccgacgccaagtcctacgagaaggaggtgcacaacatctgggccacccacgcctgcgtgcccaccgaccccaacccccaggagctggtgctgaagaacgtgaccgagaacttcaacatgtggaagaacgacatggtggaccagatgcacgaggacatcatctccctgtgggaccagtccctgaagccctgcgtgaagctgacccccctgtgcgtgaccctgcactgctccacctacaacaacacccacaacatctccaaggagatcaagaactgctccttcaacgccaccaccgagctgcgcgacaagcgccgcaaggagtacgccctgttctaccgcctggacatcgtgcccctgaacaagaacggccgccagtaccgcctgatcaactgcaacacctccgtgatcacccaggtgtgccccaagctgaccttcgaccccatccccatccactactgcgcccccgccggctacgccatcctgaagtgcaacaacaagaccttcaacggcaccggcccctgcaacaacgtgtccaccgtgcagtgcacccacggcatcaagcccgtgctgtccacccagctgctgctgaacggctccctggccgaggaggagatcatcatccgctccgagaacctgaccgacaacgtgaagaccatcatcgtgcacctgaacgagtccgtggagatcaactgcacccgccccaacaacaacacccgcaagtccatccgcatcggccccggccagaccttctacgccaccggcgacatcatcggcgacatccgccaggcccactgcaacatctccgagatcaagtggaacaagaccctgcagcgcgtgtccgagaagctgcgcgagcacttcaacaagaccatcatcttcaaccagtcctccggcggcgacctggagatcaccacccactccttcaactgcggcggcgagttcttctactgcaacacctccgacctgttcttcaacaagaccttcaacgagacctactccaccggctccaactccaccaactccaacatcaccctgccctgccgcatcaagcagatcatcaacatgtggcaggaggtgggccgcgccatgtacgcctcccccatcgccggcgagatcacctgcaagtccaacatcaccggcctgctgctgacccgcgacggcggcggcaacaactccaccgaggagaccttccgccccggcggcggcaacatgcgcgacaactggcgctccgagctgtacaagtacaaggtggtggaggtgaagcccctgggcatcgcccccaccgagtgccgccgccgcgtggtgcagggcggcggcggctccggcggcggcggctccgccgtggtgggcctgggcgccgtgttcctgggcttcctgggcaccgccggctccaccatgggcgccgcctccatgaccctgaccgtgcaggcccgccagctgctgggctccgccggctccgccggctccggctccgccggctccggctccgccggctccggctccgccggctccaccgtgtggggcatcaagcagctgcaggcccgcgtgctggccatcgagcgctacctgaaggaccagcagctgctgggcatgtggggctgctccggcaagctgatctgctgcaccaacgtgtactggaactcctcctggtccaacaagacctacaacgagatctgggacaacatgacctggatgcagtgggaccgcgagatcgacaactacaccgacaccatctacaagctgctggaggtgtcccagaagcagcaggagtccaacgagaaggacctgctggccctggactcctggaacaacctgtggaactggttcgacatctccaagtggctgtggtacatcaagatcttcatcatgatcgtgggcggcctgatcggcctgcgcatcatcttcgccgtgctgtccctggtgaaccgcgtgcgccagggcatctaataaactagtagtgactgactaggatctggttaccactaaaccagcctcaagaacacccgaatggagtctctaagctacataataccaacttacacttacaaaatgttgtcccccaaaatgtagccattcgtatctgctcctaataaaaagaaagtttcttcacattctaaaaaaaaaaaaaaaaaaaaaaaaaaaaaaaaaaaaaaaaaaaaaaaaaaaaaaaaaaaaaaaaaaaaaaaaaaaaaaaaaaaaaaaaaaaaaaaaaaaaa

SEQ ID NO: 372 - DNA, 2652 bp, synthetic construct
  source 1..2652: mol_type = other DNA
agcataaaagtctcaacacaacatatacaaaacaaacgaatctcaagcaatcaagcattctacttctattgcagcaatttaaatcatttcttttaaagcaaaagcaattttctgaaaattttcaccatttacgaacgatagcgctgccaccatggactccaagggctcctcccagaagggctcccgcctgctgctgctgctggtggtgtccaacctgctgctgccccagggcgtgctggccctgtgggtgaccgtgtactacggcgtgcccgtgtggcgcgaggccaagaccaccctgttctgcgcctccgacgccaagtcctacgagaaggaggtgcacaacatctgggccacccacgcctgcgtgcccaccgaccccaacccccaggagctggtgctgaagaacgtgaccgagaacttcaacatgtggaagaacgacatggtggaccagatgcacgaggacatcatctccctgtgggaccagtccctgaagccctgcgtgaagctgacccccctgtgcgtgaccctgcactgctccacctacaacaacacccacaacatctccaaggagatcaagaactgctccttcaacgccaccaccgagctgcgcgacaagcgccgcaaggagtacgccctgttctaccgcctggacatcgtgcccctgaacaagaacggccgccagtaccgcctgatcaactgcaacacctccgtgatcacccaggtgtgccccaagctgaccttcgaccccatccccatccactactgcgcccccgccggctacgccatcctgaagtgcaacaacaagaccttcaacggcaccggcccctgcaacaacgtgtccaccgtgcagtgcacccacggcatcaagcccgtgctgtccacccagctgctgctgaacggctccctggccgaggaggagatcatcatccgctccgagaacctgaccgacaacgtgaagaccatcatcgtgcacctgaacgagtccgtggagatcaactgcacccgccccaacaacaacacccgcaagtccatccgcatcggccccggccagaccttctacgccaccggcgacatcatcggcgacatccgccaggcccactgcaacatctccgagatcaagtggaacaagaccctgcagcgcgtgtccgagaagctgcgcgagcacttcaacaagaccatcatcttcaaccagtcctccggcggcgacctggagatcaccacccactccttcaactgcggcggcgagttcttctactgcaacacctccgacctgttcttcaacaagaccttcaacgagacctactccaccggctccaactccaccaactccaacatcaccctgccctgccgcatcaagcagatcatcaacatgtggcaggaggtgggccgcgccatgtacgcctcccccatcgccggcgagatcacctgcaagtccaacatcaccggcctgctgctgacccgcgacggcggcggcaacaactccaccgaggagaccttccgccccggcggcggcaacatgcgcgacaactggcgctccgagctgtacaagtacaaggtggtggaggtgaagcccctgggcatcgcccccaccgagtgccgccgccgcgtggtgcagggcggcggcggctccggcggcggcggctccgccgtggtgggcctgggcgccgtgttcctgggcttcctgggcaccgccggctccaccatgggcgccgcctccatgaccctgaccgtgcaggcccgccagctgctgggctccgccggctccgccggctccggctccgccggctccggctccgccggctccggctccgccggctccaccgtgtggggcatcaagcagctgcaggcccgcgtgctggccatcgagcgctacctgaaggaccagcagctgctgggcatgtggggctgctccggcaagctgatctgctgcaccaacgtgtactggaactcctcctggtccaacaagacctacaacgagatctgggacaacatgacctggatgcagtgggaccgcgagatcgacaactacaccgacaccatctacaagctgctggaggtgtcccagaagcagcaggagtccaacgagaaggacctgctggccctggactcctggaacaacctgtggaactggttcgacatctccaagtggctgtggtacatcaagatcttcatcatgatcgtgggcggcctgatcggcctgcgcatcatcttcgccgtgctgtccctggtgaaccgcgtgcgccagggcatctcccccctgtccttccagaccctgacccccaacccccgcgagctggaccgcctgggcggcatcgaggaggagggcggcgagcaggaccgcgaccgctccatccgcctggtgtccggcttcttctccctgtaataaactagtagtgactgactaggatctggttaccactaaaccagcctcaagaacacccgaatggagtctctaagctacataataccaacttacacttacaaaatgttgtcccccaaaatgtagccattcgtatctgctcctaataaaaagaaagtttcttcacattctaaaaaaaaaaaaaaaaaaaaaaaaaaaaaaaaaaaaaaaaaaaaaaaaaaaaaaaaaaaaaaaaaaaaaaaaaaaaaaaaaaaaaaaaaaaaaaaaaaaaa

SEQ ID NO: 373 - DNA, 2637 bp, synthetic construct
  source 1..2637: mol_type = other DNA
agcataaaagtctcaacacaacatatacaaaacaaacgaatctcaagcaatcaagcattctacttctattgcagcaatttaaatcatttcttttaaagcaaaagcaattttctgaaaattttcaccatttacgaacgatagcgctgccaccatggactccaagggctcctcccagaagggctcccgcctgctgctgctgctggtggtgtccaacctgctgctgccccagggcgtgctggccctgtgggtgaccgtgtactacggcgtgcccgtgtggcgcgaggccaagaccaccctgttctgcgcctccgacgccaagtcctacgagaaggaggtgcacaacatctgggccacccacgcctgcgtgcccaccgaccccaacccccaggagctggtgctgaagaacgtgaccgagaacttcaacatgtggaagaacgacatggtggaccagatgcacgaggacatcatctccctgtgggaccagtccctgaagccctgcgtgaagctgacccccctgtgcgtgaccctgcactgctccacctacaacaacacccacaacatctccaaggagatcaagaactgctccttcaacgccaccaccgagctgcgcgacaagcgccgcaaggagtacgccctgttctaccgcctggacatcgtgcccctgaacaagaacggccgccagtaccgcctgatcaactgcaacacctccgtgatcacccaggtgtgccccaagctgaccttcgaccccatccccatccactactgcgcccccgccggctacgccatcctgaagtgcaacaacaagaccttcaacggcaccggcccctgcaacaacgtgtccaccgtgcagtgcacccacggcatcaagcccgtgctgtccacccagctgctgctgaacggctccctggccgaggaggagatcatcatccgctccgagaacctgaccgacaacgtgaagaccatcatcgtgcacctgaacgagtccgtggagatcaactgcacccgccccaacaacaacacccgcaagtccatccgcatcggccccggccagaccttctacgccaccggcgacatcatcggcgacatccgccaggcccactgcaacatctccgagatcaagtggaacaagaccctgcagcgcgtgtccgagaagctgcgcgagcacttcaacaagaccatcatcttcaaccagtcctccggcggcgacctggagatcaccacccactccttcaactgcggcggcgagttcttctactgcaacacctccgacctgttcttcaacaagaccttcaacgagacctactccaccggctccaactccaccaactccaacatcaccctgccctgccgcatcaagcagatcatcaacatgtggcaggaggtgggccgcgccatgtacgcctcccccatcgccggcgagatcacctgcaagtccaacatcaccggcctgctgctgacccgcgacggcggcggcaacaactccaccgaggagaccttccgccccggcggcggcaacatgcgcgacaactggcgctccgagctgtacaagtacaaggtggtggaggtgaagcccctgggcatcgcccccaccgagtgccgccgccgcgtggtgcagggcggcggcggctccggcggcggcggctccgccgtggtgggcctgggcgccgtgttcctgggcttcctgggcaccgccggctccaccatgggcgccgcctccatgaccctgaccgtgcaggcccgccagctgctgggctccgccggctccgccggctccggctccgccggctccggctccgccggctccggctccgccggctccaccgtgtggggcatcaagcagctgcaggcccgcgtgctggccatcgagcgctacctgaaggaccagcagctgctgggcatgtggggctgctccggcaagctgatctgctgcaccaacgtgtactggaactcctcctggtccaacaagacctacaacgagatctgggacaacatgacctggatgcagtgggaccgcgagatcgacaactacaccgacaccatctacaagctgctggaggtgtcccagaagcagcaggagtccaacgagaaggacctgctggccctggactcctggaacaacctgtggaactggttcgacatctccaagtggctgtggtacatcaagatcttcatcatgatcgtgggcggcctgatcggcctgcgcatcatcttcgccgtgctgtccctggtgaaccgcgtgcgccagggcatctcccccctgtccttccagaccctgacccccaacccccgcgagctggaccgcctgggcggcatcgaggaggagggcggcgagcaggaccgcgaccgctccatccgcctggtgtcctaataaactagtagtgactgactaggatctggttaccactaaaccagcctcaagaacacccgaatggagtctctaagctacataataccaacttacacttacaaaatgttgtcccccaaaatgtagccattcgtatctgctcctaataaaaagaaagtttcttcacattctaaaaaaaaaaaaaaaaaaaaaaaaaaaaaaaaaaaaaaaaaaaaaaaaaaaaaaaaaaaaaaaaaaaaaaaaaaaaaaaaaaaaaaaaaaaaaaaaaaaaa

SEQ ID NO: 374 - DNA, 2976 bp, synthetic construct
  source 1..2976: mol_type = other DNA
agcataaaagtctcaacacaacatatacaaaacaaacgaatctcaagcaatcaagcattctacttctattgcagcaatttaaatcatttcttttaaagcaaaagcaattttctgaaaattttcaccatttacgaacgatagcgctgccaccatggactccaagggctcctcccagaagggctcccgcctgctgctgctgctggtggtgtccaacctgctgctgccccagggcgtgctggccctgtgggtgaccgtgtactacggcgtgcccgtgtggcgcgaggccaagaccaccctgttctgcgcctccgacgccaagtcctacgagaaggaggtgcacaacatctgggccacccacgcctgcgtgcccaccgaccccaacccccaggagctggtgctgaagaacgtgaccgagaacttcaacatgtggaagaacgacatggtggaccagatgcacgaggacatcatctccctgtgggaccagtccctgaagccctgcgtgaagctgacccccctgtgcgtgaccctgcactgctccacctacaacaacacccacaacatctccaaggagatcaagaactgctccttcaacgccaccaccgagctgcgcgacaagcgccgcaaggagtacgccctgttctaccgcctggacatcgtgcccctgaacaagaacggccgccagtaccgcctgatcaactgcaacacctccgtgtgcacccaggtgtgccccaagctgaccttcgaccccatccccatccactactgcgcccccgccggctacgccatcctgaagtgcaacaacaagaccttcaacggcaccggcccctgcaacaacgtgtccaccgtgcagtgcacccacggcatcaagcccgtgctgtccacccagctgctgctgaacggctccctggccgaggaggagatcatcatccgctccgagaacctgaccgacaacgtgaagaccatcatcgtgcacctgaacgagtccgtggagatcaactgcacccgccccaacaacaacacccgcaagtccatccgcatcggccccggccagaccttctacgccaccggcgacatcatcggcgacatccgccaggcccactgcaacatctccgagatcaagtggaacaagaccctgcagcgcgtgtccgagaagctgcgcgagcacttcaacaagaccatcatcttcaaccagtcctccggcggcgacctggagatcaccacccactccttcaactgcggcggcgagttcttctactgcaacacctccgacctgttcttcaacaagaccttcaacgagacctactccaccggctccaactccaccaactccaacatcaccctgccctgccgcatcaagcagatcatcaacatgtggcaggaggtgggccgctgcatgtacgcctcccccatcgccggcgagatcacctgcaagtccaacatcaccggcctgctgctgacccgcgacggcggcggcaacaactccaccgaggagaccttccgccccggcggcggcaacatgcgcgacaactggcgctccgagctgtacaagtacaaggtggtggaggtgaagcccctgggcatcgcccccaccgagtgccgccgccgcgtggtgcagggcggcggcggctccggcggcggcggctccgccgtggtgggcctgggcgccgtgttcctgggcttcctgggcaccgccggctccaccatgggcgccgcctccatgaccctgaccgtgcaggcccgccagctgctgggctccgccggctccgccggctccggctccgccggctccggctccgccggctccggctccgccggctccaccgtgtggggcatcaagcagctgcaggcccgcgtgctggccatcgagcgctacctgaaggaccagcagctgctgggcatgtggggctgctccggcaagctgatctgctgcaccaacgtgtactggaactcctcctggtccaacaagacctacaacgagatctgggacaacatgacctggatgcagtgggaccgcgagatcgacaactacaccgacaccatctacaagctgctggaggtgtcccagaagcagcaggagtccaacgagaaggacctgctggccctggactcctggaacaacctgtggaactggttcgacatctccaagtggctgtggtacatcaagatcttcatcatgatcgtgggcggcctgatcggcctgcgcatcatcttcgccgtgctgtccctggtgaaccgcgtgcgccagggcatctcccccctgtccttccagaccctgacccccaacccccgcgagctggaccgcctgggcggcatcgaggaggagggcggcgagcaggaccgcgaccgctccatccgcctggtgtccggcttcttctccctggcctggaacgacctgcgctccctgtgcctgttctgctaccaccgcctgcgcgacttcatcctgatcgccggccgcgccgtggagctgctgggccgctcctccctgcagggcctgcagcgcggctgggagatcctgaagtacctgggctccctggtgcagtactggggcctggagctgaagaagtccgccatcaacctgttcgacaccatcgccatcgccgtggccgagggcaccgaccgcatcatcgagttcctgcagcgcatcgtgcgcgccatcctgcacatcccccgccgcatccgccagggcttcgaggccgccgccgcctaataaactagtagtgactgactaggatctggttaccactaaaccagcctcaagaacacccgaatggagtctctaagctacataataccaacttacacttacaaaatgttgtcccccaaaatgtagccattcgtatctgctcctaataaaaagaaagtttcttcacattctaaaaaaaaaaaaaaaaaaaaaaaaaaaaaaaaaaaaaaaaaaaaaaaaaaaaaaaaaaaaaaaaaaaaaaaaaaaaaaaaaaaaaaaaaaaaaaaaaaaaa

SEQ ID NO: 375 - DNA, 2361 bp, synthetic construct
  source 1..2361: mol_type = other DNA
agcataaaagtctcaacacaacatatacaaaacaaacgaatctcaagcaatcaagcattctacttctattgcagcaatttaaatcatttcttttaaagcaaaagcaattttctgaaaattttcaccatttacgaacgatagcgctgccaccatgggctggtcctgcatcatcctgttcctggtggccaccgccaccggcgtgcacgccgtggagaacctgtgggtgaccgtgtactacggcgtgcccgtgtggcgcgacgccgacaccaccctgttctgcgcctccgacgccaaggcctacgagaccgagaagcacaacgtgtgggccacccacgcctgcgtgcccaccgaccccaacccccaggagatccacctggacaacgtgaccgagaagttcaacatgtggaagaacaacatggtggagcagatgcacaccgacatcatctccctgtgggaccagtccctgaagccctgcgtgaagctgacccccctgtgcgtgaccctgcactgcaccaacgtgacctccgtgaacaccaccggcgaccgcgagggcctgaagaactgctccttcaacatgaccaccgagctgcgcgacaagcgccagaaggtgtactccctgttctaccgcctggacatcgtgcccatcaacgagaaccagggctccgagtaccgcctgatcaactgcaacacctccgcctgcacccaggcctgccccaaggtgtccttcgagcccatccccatccactactgcacccccgccggcttcgccatcctgaagtgcaaggacgagggcttcaacggcaccggcctgtgcaagaacgtgtccaccgtgcagtgcacccacggcatcaagcccgtggtgtccacccagctgctgctgaacggctccctggccgagaagaacatcaccatccgctccgagaacatcaccaacaacgccaagatcatcatcgtgcagctggtgcagcccgtgaccatcaagtgcatccgccccaacaacaacacccgcaagtccatccgcatcggccccggccaggccttctacgccaccggcgacatcatcggcgacatccgccaggcccactgcaacgtgacccgctcccgctggaacaagaccctgcaggaggtggccgagaagctgcgcacctacttcggcaacaagaccatcatcttcgccaactcctccggcggcgacctggagatcaccacccactccttcaactgcggcggcgagttcttctactgcaacacctccggcctgttcaactccacctggtacgtgaactccacctggaacgacaccgactccacccaggagtccaacgacaccatcaccctgccctgccgcatcaagcagatcatcaacatgtggcagcgcgccggccagtgcatgtacgccccccccatccccggcgtgatcaagtgcgagtccaacatcaccggcctgctgctgacccgcgacggcggcaaggacaacaacgtgaacgagaccttccgccccggcggcggcgacatgcgcgacaactggcgctccgagctgtacaagtacaaggtggtggagatcgagcccctgggcgtggcccccacccgctgcaagcgccgcgtggtggagcgccgccgccgccgccgcgccgtgggcatcggcgccgtgttcctgggcttcctgggcgccgccggctccaccatgggcgccacctccatgaccctgaccgtgcaggcccgccagctgctgggctccgccggctccgccggctccggctccgccggctccggctccgccggctccggctccgccggctccaccgtgtggggcatcaagcagctgcaggcccgcgtgctggccgtggagcgctacctgcgcgaccagcagctgctgggcatctggggctgctccggcaagctgatctgctgcaccaacgtgccctggaactcctcctggtccaacaagtccctggacgagatctggaacaacatgacctggctgcagtgggacaaggagatcaacaactacacccagctgatctaccgcctgatcgaggagtcccagaaccagcaggagaagaacgagcaggacctgctggagctggactaataaactagtagtgactgactaggatctggttaccactaaaccagcctcaagaacacccgaatggagtctctaagctacataataccaacttacacttacaaaatgttgtcccccaaaatgtagccattcgtatctgctcctaataaaaagaaagtttcttcacattctaaaaaaaaaaaaaaaaaaaaaaaaaaaaaaaaaaaaaaaaaaaaaaaaaaaaaaaaaaaaaaaaaaaaaaaaaaaaaaaaaaaaaaaaaaaaaaaaaaaaa

SEQ ID NO: 376 - DNA, 2373 bp, synthetic construct
  source 1..2373: mol_type = other DNA
agcataaaagtctcaacacaacatatacaaaacaaacgaatctcaagcaatcaagcattctacttctattgcagcaatttaaatcatttcttttaaagcaaaagcaattttctgaaaattttcaccatttacgaacgatagcgctgccaccatgggctggtcctgcatcatcctgttcctggtggccaccgccaccggcgtgcacgccgtggagaacctgtgggtgaccgtgtactacggcgtgcccgtgtggcgcgacgccgacaccaccctgttctgcgcctccgacgccaaggcctacgagaccgagaagcacaacgtgtgggccacccacgcctgcgtgcccaccgaccccaacccccaggagatccacctggacaacgtgaccgagaagttcaacatgtggaagaacaacatggtggagcagatgcacaccgacatcatctccctgtgggaccagtccctgaagccctgcgtgaagctgacccccctgtgcgtgaccctgcactgcaccaacgtgacctccgtgaacaccaccggcgaccgcgagggcctgaagaactgctccttcaacatgaccaccgagctgcgcgacaagcgccagaaggtgtactccctgttctaccgcctggacatcgtgcccatcaacgagaaccagggctccgagtaccgcctgatcaactgcaacacctccgcctgcacccaggcctgccccaaggtgtccttcgagcccatccccatccactactgcacccccgccggcttcgccatcctgaagtgcaaggacgagggcttcaacggcaccggcctgtgcaagaacgtgtccaccgtgcagtgcacccacggcatcaagcccgtggtgtccacccagctgctgctgaacggctccctggccgagaagaacatcaccatccgctccgagaacatcaccaacaacgccaagatcatcatcgtgcagctggtgcagcccgtgaccatcaagtgcatccgccccaacaacaacacccgcaagtccatccgcatcggccccggccaggccttctacgccaccggcgacatcatcggcgacatccgccaggcccactgcaacgtgacccgctcccgctggaacaagaccctgcaggaggtggccgagaagctgcgcacctacttcggcaacaagaccatcatcttcgccaactcctccggcggcgacctggagatcaccacccactccttcaactgcggcggcgagttcttctactgcaacacctccggcctgttcaactccacctggtacgtgaactccacctggaacgacaccgactccacccaggagtccaacgacaccatcaccctgccctgccgcatcaagcagatcatcaacatgtggcagcgcgccggccagtgcatgtacgccccccccatccccggcgtgatcaagtgcgagtccaacatcaccggcctgctgctgacccgcgacggcggcaaggacaacaacgtgaacgagaccttccgccccggcggcggcgacatgcgcgacaactggcgctccgagctgtacaagtacaaggtggtggagatcgagcccctgggcgtggcccccacccgctgcaagcgccgcgtggtggagggcggcggcggctccggcggcggcggctccgccgtgggcatcggcgccgtgttcctgggcttcctgggcgccgccggctccaccatgggcgccacctccatgaccctgaccgtgcaggcccgccagctgctgggctccgccggctccgccggctccggctccgccggctccggctccgccggctccggctccgccggctccaccgtgtggggcatcaagcagctgcaggcccgcgtgctggccgtggagcgctacctgcgcgaccagcagctgctgggcatctggggctgctccggcaagctgatctgctgcaccaacgtgccctggaactcctcctggtccaacaagtccctggacgagatctggaacaacatgacctggctgcagtgggacaaggagatcaacaactacacccagctgatctaccgcctgatcgaggagtcccagaaccagcaggagaagaacgagcaggacctgctggagctggactaataaactagtagtgactgactaggatctggttaccactaaaccagcctcaagaacacccgaatggagtctctaagctacataataccaacttacacttacaaaatgttgtcccccaaaatgtagccattcgtatctgctcctaataaaaagaaagtttcttcacattctaaaaaaaaaaaaaaaaaaaaaaaaaaaaaaaaaaaaaaaaaaaaaaaaaaaaaaaaaaaaaaaaaaaaaaaaaaaaaaaaaaaaaaaaaaaaaaaaaaaaa

SEQ ID NO: 377 - DNA, 2379 bp, synthetic construct
  source 1..2379: mol_type = other DNA
agcataaaagtctcaacacaacatatacaaaacaaacgaatctcaagcaatcaagcattctacttctattgcagcaatttaaatcatttcttttaaagcaaaagcaattttctgaaaattttcaccatttacgaacgatagcgctgccaccatgggctggtcctgcatcatcctgttcctggtggccaccgccaccggcgtgcacgccgtggagaacctgtgggtgaccgtgtactacggcgtgcccgtgtggcgcgacgccgacaccaccctgttctgcgcctccgacgccaaggcctacgagaccgagaagcacaacgtgtgggccacccacgcctgcgtgcccaccgaccccaacccccaggagatccacctggacaacgtgaccgagaagttcaacatgtggaagaacaacatggtggagcagatgcacaccgacatcatctccctgtgggaccagtccctgaagccctgcgtgaagctgacccccctgtgcgtgaccctgcactgcaccaacgtgacctccgtgaacaccaccggcgaccgcgagggcctgaagaactgctccttcaacatgaccaccgagctgcgcgacaagcgccagaaggtgtactccctgttctaccgcctggacatcgtgcccatcaacgagaaccagggctccgagtaccgcctgatcaactgcaacacctccgcctgcacccaggcctgccccaaggtgtccttcgagcccatccccatccactactgcacccccgccggcttcgccatcctgaagtgcaaggacgagggcttcaacggcaccggcctgtgcaagaacgtgtccaccgtgcagtgcacccacggcatcaagcccgtggtgtccacccagctgctgctgaacggctccctggccgagaagaacatcaccatccgctccgagaacatcaccaacaacgccaagatcatcatcgtgcagctggtgcagcccgtgaccatcaagtgcatccgccccaacaacaacacccgcaagtccatccgcatcggccccggccaggccttctacgccaccggcgacatcatcggcgacatccgccaggcccactgcaacgtgacccgctcccgctggaacaagaccctgcaggaggtggccgagaagctgcgcacctacttcggcaacaagaccatcatcttcgccaactcctccggcggcgacctggagatcaccacccactccttcaactgcggcggcgagttcttctactgcaacacctccggcctgttcaactccacctggtacgtgaactccacctggaacgacaccgactccacccaggagtccaacgacaccatcaccctgccctgccgcatcaagcagatcatcaacatgtggcagcgcgccggccagtgcatgtacgccccccccatccccggcgtgatcaagtgcgagtccaacatcaccggcctgctgctgacccgcgacggcggcaaggacaacaacgtgaacgagaccttccgccccggcggcggcgacatgcgcgacaactggcgctccgagctgtacaagtacaaggtggtggagatcgagcccctgggcgtggcccccacccgctgcaagcgccgcgtggtggagcgccgccgccgccgccgcgccgtgggcatcggcgccgtgttcctgggcttcctgggcgccgccggctccaccatgggcgccacctccatgaccctgaccgtgcaggcccgccagctgctgggctccgccggctccgccggctccggctccgccggctccggctccgccggctccggctccgccggctccaccgtgtggggcatcaagcagctgcaggcccgcgtgctggccgtggagcgctacctgcgcgaccagcagctgctgggcatctggggctgctccggcaagctgatctgctgcaccaacgtgccctggaactcctcctggtccaacaagtccctggacgagatctggaacaacatgacctggctgcagtgggacaaggagatcaacaactacacccagctgatctaccgcctgatcgaggagtcccagaaccagcaggagaagaacgagcaggacctgctggagctggacctgccctccaccggcggctaataaactagtagtgactgactaggatctggttaccactaaaccagcctcaagaacacccgaatggagtctctaagctacataataccaacttacacttacaaaatgttgtcccccaaaatgtagccattcgtatctgctcctaataaaaagaaagtttcttcacattctaaaaaaaaaaaaaaaaaaaaaaaaaaaaaaaaaaaaaaaaaaaaaaaaaaaaaaaaaaaaaaaaaaaaaaaaaaaaaaaaaaaaaaaaaaaaaaaaaaaaa

SEQ ID NO: 378 - DNA, 2391 bp, synthetic construct
  source 1..2391: mol_type = other DNA
agcataaaagtctcaacacaacatatacaaaacaaacgaatctcaagcaatcaagcattctacttctattgcagcaatttaaatcatttcttttaaagcaaaagcaattttctgaaaattttcaccatttacgaacgatagcgctgccaccatgggctggtcctgcatcatcctgttcctggtggccaccgccaccggcgtgcacgccgtggagaacctgtgggtgaccgtgtactacggcgtgcccgtgtggcgcgacgccgacaccaccctgttctgcgcctccgacgccaaggcctacgagaccgagaagcacaacgtgtgggccacccacgcctgcgtgcccaccgaccccaacccccaggagatccacctggacaacgtgaccgagaagttcaacatgtggaagaacaacatggtggagcagatgcacaccgacatcatctccctgtgggaccagtccctgaagccctgcgtgaagctgacccccctgtgcgtgaccctgcactgcaccaacgtgacctccgtgaacaccaccggcgaccgcgagggcctgaagaactgctccttcaacatgaccaccgagctgcgcgacaagcgccagaaggtgtactccctgttctaccgcctggacatcgtgcccatcaacgagaaccagggctccgagtaccgcctgatcaactgcaacacctccgcctgcacccaggcctgccccaaggtgtccttcgagcccatccccatccactactgcacccccgccggcttcgccatcctgaagtgcaaggacgagggcttcaacggcaccggcctgtgcaagaacgtgtccaccgtgcagtgcacccacggcatcaagcccgtggtgtccacccagctgctgctgaacggctccctggccgagaagaacatcaccatccgctccgagaacatcaccaacaacgccaagatcatcatcgtgcagctggtgcagcccgtgaccatcaagtgcatccgccccaacaacaacacccgcaagtccatccgcatcggccccggccaggccttctacgccaccggcgacatcatcggcgacatccgccaggcccactgcaacgtgacccgctcccgctggaacaagaccctgcaggaggtggccgagaagctgcgcacctacttcggcaacaagaccatcatcttcgccaactcctccggcggcgacctggagatcaccacccactccttcaactgcggcggcgagttcttctactgcaacacctccggcctgttcaactccacctggtacgtgaactccacctggaacgacaccgactccacccaggagtccaacgacaccatcaccctgccctgccgcatcaagcagatcatcaacatgtggcagcgcgccggccagtgcatgtacgccccccccatccccggcgtgatcaagtgcgagtccaacatcaccggcctgctgctgacccgcgacggcggcaaggacaacaacgtgaacgagaccttccgccccggcggcggcgacatgcgcgacaactggcgctccgagctgtacaagtacaaggtggtggagatcgagcccctgggcgtggcccccacccgctgcaagcgccgcgtggtggagggcggcggcggctccggcggcggcggctccgccgtgggcatcggcgccgtgttcctgggcttcctgggcgccgccggctccaccatgggcgccacctccatgaccctgaccgtgcaggcccgccagctgctgggctccgccggctccgccggctccggctccgccggctccggctccgccggctccggctccgccggctccaccgtgtggggcatcaagcagctgcaggcccgcgtgctggccgtggagcgctacctgcgcgaccagcagctgctgggcatctggggctgctccggcaagctgatctgctgcaccaacgtgccctggaactcctcctggtccaacaagtccctggacgagatctggaacaacatgacctggctgcagtgggacaaggagatcaacaactacacccagctgatctaccgcctgatcgaggagtcccagaaccagcaggagaagaacgagcaggacctgctggagctggacctgccctccaccggcggctaataaactagtagtgactgactaggatctggttaccactaaaccagcctcaagaacacccgaatggagtctctaagctacataataccaacttacacttacaaaatgttgtcccccaaaatgtagccattcgtatctgctcctaataaaaagaaagtttcttcacattctaaaaaaaaaaaaaaaaaaaaaaaaaaaaaaaaaaaaaaaaaaaaaaaaaaaaaaaaaaaaaaaaaaaaaaaaaaaaaaaaaaaaaaaaaaaaaaaaaaaaa

SEQ ID NO: 379 - DNA, 2361 bp, synthetic construct
  source 1..2361: mol_type = other DNA
agcataaaagtctcaacacaacatatacaaaacaaacgaatctcaagcaatcaagcattctacttctattgcagcaatttaaatcatttcttttaaagcaaaagcaattttctgaaaattttcaccatttacgaacgatagcgctgccaccatgggctggtcctgcatcatcctgttcctggtggccaccgccaccggcgtgcacgccctgtgggtgaccgtgtactacggcgtgcccgtgtggcgcgaggcctgcaccaccctgttctgcgcctccgacgccaagtcctacgagaagaaggtgcgcaacgtgtgggccacccactgctgcgtgcccaccgaccccaacccccaggagctggtgctgaagaacgtgaccgagaacttcaacatgtggaagaacgacatggtggaccagatgcacgaggacatcatctccctgtgggaccagtccctgaagccctgcgtgaagctgacccccctgtgcgtgaccctgcactgctccacctacaacaacacccacaacatctccaaggagatcaagaactgctccttcaacgccaccaccgagctgcgcgacaagcgcaagaaggagtacgccctgttctaccgcctggacatcgtgcccctgaacaagaacggccgccagtaccgcctgatcaactgcaacacctccgtgtgcacccaggcctgccccaaggtgaccttcgaccccatccccatccactactgcgcccccgccggctacgccatcctgaagtgcaacaacaagaccttcaacggcaccggcccctgcaacaacgtgtccaccgtgcagtgcacccacggcatcaagcccgtggtgtccacccagctgctgctgaacggctccctggccgaggaggagatcatcatccgctccgagaacctgaccgacaacgtgaagaccatcatcgtgcacctgaacgagtccgtggagatcaactgcacccgccccaacaacaacacccgcaagtccatccgcatcggccccggccagtggttctacgccaccggcgacatcatcggcgacatccgccaggcccactgcaacatctccgagatcaagtggaacaagaccctgcagcgcgtgtccgagaagctgcgcgagcacttcaacaagaccatcatcttcaaccagtcctccggcggcgacctggagatcaccacccactacttcaactgcggcggcgagttcttctactgcaacacctccgacctgttcttcaacaagaccttcaacgagacctactccaccggctccaactccaccaactccaacatcaccctgccctgccgcatcaagcagatcatcaacatgtggcaggaggtgggccgctgcatgtacgcctcccccatcgccggcgagatcacctgcaagtccaacatcaccggcctgctgctgacccgcgacggcggcggcaacaactccaccgaggagaccttccgccccggcggcggcaacatgcgcgacaactggcgctccgagctgtacaagtacaaggtggtggaggtgaagcccctgggcatcgcccccaccgagtgccgccgccgcgtggtgcagcgccgccgccgccgccgcgccgtggtgggcctgggcgccgtgttcctgggcttcctgggcaccgccggctccaccatgggcgccgcctccatgaccctgaccgtgcaggcccgccagctgctgggctccgccggctccgccggctccggctccgccggctccggctccgccggctccggctccgccggctccaccgtgtggggcatcaagcagctgcaggcccgcgtgctggccatcgagcgctacctgaaggaccagcagctgctgggcatgtggggctgctccggcaagctgatctgctgcaccaacgtgtactggaactcctcctggtccaacaagacctacaacgagatctgggacaacatgacctggatgcagtgggaccgcgagatcgacaactacaccgacaccatctacaagctgctggaggtgtcccagaagcagcaggagaagaacgagcaggacctgctggccctggacggctccggcctgccctccaccggcggctaataaactagtagtgactgactaggatctggttaccactaaaccagcctcaagaacacccgaatggagtctctaagctacataataccaacttacacttacaaaatgttgtcccccaaaatgtagccattcgtatctgctcctaataaaaagaaagtttcttcacattctaaaaaaaaaaaaaaaaaaaaaaaaaaaaaaaaaaaaaaaaaaaaaaaaaaaaaaaaaaaaaaaaaaaaaaaaaaaaaaaaaaaaaaaaaaaaaaaaaaaaa

SEQ ID NO: 380 - DNA, 2361 bp, synthetic construct
  source 1..2361: mol_type = other DNA
agcataaaagtctcaacacaacatatacaaaacaaacgaatctcaagcaatcaagcattctacttctattgcagcaatttaaatcatttcttttaaagcaaaagcaattttctgaaaattttcaccatttacgaacgatagcgctgccaccatgggctggtcctgcatcatcctgttcctggtggccaccgccaccggcgtgcacgccctgtgggtgaccgtgtactacggcgtgcccgtgtggcgcgaggccaagaccaccctgttctgcgcctccgacgccaagtcctacgagaaggaggtgcacaacgtgtgggccacccacgcctgcgtgcccaccgaccccaacccccaggagctggtgctgaagaacgtgaccgagaacttcaacatgtggaagaacgacatggtggaccagatgcacgaggacatcatctccctgtgggaccagtccctgaagccctgcgtgaagctgacccccctgtgcgtgaccctgcactgctccacctacaacaacacccacaacatctccaaggagatcaagaactgctccttcaacgccaccaccgagctgcgcgacaagcgcaagaaggagtacgccctgttctaccgcctggacatcgtgcccctgaacaagaacggccgccagtaccgcctgatcaactgcaacacctccgtgtgcacccaggcctgccccaaggtgaccttcgaccccatccccatccactactgcgcccccgccggctacgccatcctgaagtgcaacaacaagaccttcaacggcaccggcccctgcaacaacgtgtccaccgtgcagtgcacccacggcatcaagcccgtggtgtccacccagctgctgctgaacggctccctggccgaggaggagatcatcatccgctccgagaacctgaccgacaacgtgaagaccatcatcgtgcacctgaacgagtccgtggagatcaactgcacccgccccaacaacaacacccgcaagtccatccgcatcggccccggccagaccttctacgccaccggcgacatcatcggcgacatccgccaggcccactgcaacatctccgagatcaagtggaacaagaccctgcagcgcgtgtccgagaagctgcgcgagcacttcaacaagaccatcatcttcaaccagtcctccggcggcgacctggagatcaccacccactacttcaactgcggcggcgagttcttctactgcaacacctccgacctgttcttcaacaagaccttcaacgagacctactccaccggctccaactccaccaactccaacatcaccctgccctgccgcatcaagcagatcatcaacatgtggcaggaggtgggccgctgcatgtacgcctcccccatcgccggcgagatcacctgcaagtccaacatcaccggcctgctgctgacccgcgacggcggcggcaacaactccaccgaggagaccttccgccccggcggcggcaacatgcgcgacaactggcgctccgagctgtacaagtacaaggtggtggaggtgaagcccctgggcatcgcccccaccgagtgccgccgccgcgtggtgcagcgccgccgccgccgccgcgccgtggtgggcctgggcgccgtgttcctgggcttcctgggcaccgccggctccaccatgggcgccgcctccatgaccctgaccgtgcaggcccgccagctgctgggctccgccggctccgccggctccggctccgccggctccggctccgccggctccggctccgccggctccaccgtgtggggcatcaagcagctgcaggcccgcgtgctggccatcgagcgctacctgaaggaccagcagctgctgggcatgtggggctgctccggcaagctgatctgctgcaccaacgtgtactggaactcctcctggtccaacaagacctacaacgagatctgggacaacatgacctggatgcagtgggaccgcgagatcgacaactacaccgacaccatctacaagctgctggaggtgtcccagaagcagcaggagtccaacgagcaggacctgctggccctggacggctccggcctgccctccaccggcggctaataaactagtagtgactgactaggatctggttaccactaaaccagcctcaagaacacccgaatggagtctctaagctacataataccaacttacacttacaaaatgttgtcccccaaaatgtagccattcgtatctgctcctaataaaaagaaagtttcttcacattctaaaaaaaaaaaaaaaaaaaaaaaaaaaaaaaaaaaaaaaaaaaaaaaaaaaaaaaaaaaaaaaaaaaaaaaaaaaaaaaaaaaaaaaaaaaaaaaaaaaaa

SEQ ID NO: 381 - DNA, 2322 bp, synthetic construct
  source 1..2322: mol_type = other DNA
agcataaaagtctcaacacaacatatacaaaacaaacgaatctcaagcaatcaagcattctacttctattgcagcaatttaaatcatttcttttaaagcaaaagcaattttctgaaaattttcaccatttacgaacgatagcgctgccaccatgggctggtcctgcatcatcctgttcctggtggccaccgccaccggcgtgcacgccctgtgggtgaccgtgtactacggcgtgcccgtgtggcgcgaggcctgcaccaccctgttctgcgcctccgacgccaagtcctacgagaagaaggtgcgcaacgtgtgggccacccactgctgcgtgcccaccgaccccaacccccaggagctggtgctgaagaacgtgaccgagaacttcaacatgtggaagaacgacatggtggaccagatgcacgaggacatcatctccctgtgggaccagtccctgaagccctgcgtgaagctgacccccctgtgcgtgaccctgcactgctccacctacaacaacacccacaacatctccaaggagatcaagaactgctccttcaacgccaccaccgagctgcgcgacaagcgcaagaaggagtacgccctgttctaccgcctggacatcgtgcccctgaacaagaacggccgccagtaccgcctgatcaactgcaacacctccgtgtgcacccaggcctgccccaaggtgaccttcgaccccatccccatccactactgcgcccccgccggctacgccatcctgaagtgcaacaacaagaccttcaacggcaccggcccctgcaacaacgtgtccaccgtgcagtgcacccacggcatcaagcccgtggtgtccacccagctgctgctgaacggctccctggccgaggaggagatcatcatccgctccgagaacctgaccgacaacgtgaagaccatcatcgtgcacctgaacgagtccgtggagatcaactgcacccgccccaacaacaacacccgcaagtccatccgcatcggccccggccagtggttctacgccaccggcgacatcatcggcgacatccgccaggcccactgcaacatctccgagatcaagtggaacaagaccctgcagcgcgtgtccgagaagctgcgcgagcacttcaacaagaccatcatcttcaaccagtcctccggcggcgacctggagatcaccacccactacttcaactgcggcggcgagttcttctactgcaacacctccgacctgttcttcaacaagaccttcaacgagacctactccaccggctccaactccaccaactccaacatcaccctgccctgccgcatcaagcagatcatcaacatgtggcaggaggtgggccgctgcatgtacgcctcccccatcgccggcgagatcacctgcaagtccaacatcaccggcctgctgctgacccgcgacggcggcggcaacaactccaccgaggagaccttccgccccggcggcggcaacatgcgcgacaactggcgctccgagctgtacaagtacaaggtggtggaggtgaagcccctgggcatcgcccccaccgagtgccgccgccgcgtggtgcagcgccgccgccgccgccgcgccgtggtgggcctgggcgccgtgttcctgggcttcctgggcaccgccggctccaccatgggcgccgcctccatgaccctgaccgtgcaggcccgccagctgctgtccggcaaccccgactggctgcccgacatgaccgtgtggggcatcaagcagctgcaggcccgcgtgctggccatcgagcgctacctgaaggaccagcagctgctgggcatgtggggctgctccggcaagctgatctgctgcaccaacgtgtactggaactcctcctggtccaacaagacctacaacgagatctgggacaacatgacctggatgcagtgggaccgcgagatcgacaactacaccgacaccatctacaagctgctggaggtgtcccagaagcagcaggagaagaacgagcaggacctgctggccctggacggctccggcctgccctccaccggcggctaataaactagtagtgactgactaggatctggttaccactaaaccagcctcaagaacacccgaatggagtctctaagctacataataccaacttacacttacaaaatgttgtcccccaaaatgtagccattcgtatctgctcctaataaaaagaaagtttcttcacattctaaaaaaaaaaaaaaaaaaaaaaaaaaaaaaaaaaaaaaaaaaaaaaaaaaaaaaaaaaaaaaaaaaaaaaaaaaaaaaaaaaaaaaaaaaaaaaaaaaaaa

SEQ ID NO: 382 - DNA, 2050 bp, synthetic construct
  source 1..2050: mol_type = other DNA
agcataaaagtctcaacacaacatatacaaaacaaacgaatctcaagcaatcaagcattctacttctattgcagcaatttaaatcatttcttttaaagcaaaagcaattttctgaaaattttcaccatttacgaacgatagcgctgccaccatgggctggtcctgcatcatcctgttcctggtggccaccgccaccggcgtgcacgccctgtgggtgaccgtgtactacggcgtgcccgtgtggcgcgaggccaagaccaccctgttctgcgcctccgacgccaagtcctacgagaaggaggtgcacaacgtgtgggccacccacgcctgcgtgcccaccgaccccaacccccaggagctggtgctgaagaacgtgaccgagaacttcaacatgtggaagaacgacatggtggaccagatgcacgaggacatcatctccctgtgggaccagtccctgaagccctgcgtgaagctgacccccctgtgcgtgaccctgcactgctccacctacaacaacacccacaacatctccaaggagatcaagaactgctccttcaacgccaccaccgagctgcgcgacaagcgcaagaaggagtacgccctgttctaccgcctggacatcgtgcccctgaacaagaacggccgccagtaccgcctgatcaactgcaacacctccgtgtgcacccaggcctgccccaaggtgaccttcgaccccatccccatccactactgcgcccccgccggctacgccatcctgaagtgcaacaacaagaccttcaacggcaccggcccctgcaacaacgtgtccaccgtgcagtgcacccacggcatcaagcccgtggtgtccacccagctgctgctgaacggctccctggccgaggaggagatcatcatccgctccgagaacctgaccgacaacgtgaagaccatcatcgtgcacctgaacgagtccgtggagatcaactgcacccgccccaacaacaacacccgcaagtccatccgcatcggccccggccagaccttctacgccaccggcgacatcatcggcgacatccgccaggcccactgcaacatctccgagatcaagtggaacaagaccctgcagcgcgtgtccgagaagctgcgcgagcacttcaacaagaccatcatcttcaaccagtcctccggcggcgacctggagatcaccacccactacttcaactgcggcggcgagttcttctactgcaacacctccgacctgttcttcaacaagaccttcaacgagacctactccaccggctccaactccaccaactccaacatcaccctgccctgccgcatcaagcagatcatcaacatgtggcaggaggtgggccgctgcatgtacgcctcccccatcgccggcgagatcacctgcaagtccaacatcaccggcctgctgctgacccgcgacggcggcggcaacaactccaccgaggagaccttccgccccggcggcggcaacatgcgcgacaactggcgctccgagctgtacaagtacaaggtggtggaggtgaagcccctgggcatcgcccccaccgagtgccgccgccgcgtggtgcagcgccgccgccgccgccgcgccgtggtgggcctgggcgccgtgttcctgggcttcctgggcaccgccggctccaccatgggcgccgcctccatgaccctgaccgtgcaggcccgccagctgctgtccggcaaccccgactggctgcccgacatgaccgtgtggggcatcaagcagctgcaggcccgcgtgctggccatcgagcgctacctgaaggaccagcagctgctgggcatgtggggctgctccggcaagctgatctgctgcaccaacgtgtactggaactcctcctggtccaacaagacctacaacgagatctgggacaacatgacctggatgcagtgggaccgcgagatcgacaactacaccgacaccatctacaagctgctggaggtgtcccagaagcagcaggagtccaacgagcaggacctgctggccctggacggctccggcctgccctccaccggcggc

SEQ ID NO: 383 - DNA, 2382 bp, synthetic construct
  source 1..2382: mol_type = other DNA
agcataaaagtctcaacacaacatatacaaaacaaacgaatctcaagcaatcaagcattctacttctattgcagcaatttaaatcatttcttttaaagcaaaagcaattttctgaaaattttcaccatttacgaacgatagcgctgccaccatgcccatgggctccctgcagcccctggccaccctgtacctgctgggcatgctggtggcctccgtgctggccgccgagaacctgtgggtgaccgtgtactacggcgtgcccgtgtggcgcgaggccaagaccaccctgttctgcgcctccgacgccaagtcctacgagaaggaggtgcacaacgtgtgggccacccacgcctgcgtgcccaccgaccccaacccccaggagctggtgctgaagaacgtgaccgagaacttcaacatgtggaagaacgacatggtggaccagatgcacgaggacatcatctccctgtgggaccagtccctgaagccctgcgtgaagctgacccccctgtgcgtgaccctgcactgctccacctacaacaacacccacaacatctccaaggagatcaagaactgctccttcaacgccaccaccgagctgcgcgacaagcgcaagaaggagtacgccctgttctaccgcctggacatcgtgcccctgaacaagaacggccgccagtaccgcctgatcaactgcaacacctccgtgtgcacccaggcctgccccaaggtgaccttcgaccccatccccatccactactgcgcccccgccggctacgccatcctgaagtgcaacaacaagaccttcaacggcaccggcccctgcaacaacgtgtccaccgtgcagtgcacccacggcatcaagcccgtggtgtccacccagctgctgctgaacggctccctggccgaggaggagatcatcatccgctccgagaacctgaccgacaacgtgaagaccatcatcgtgcacctgaacgagtccgtggagatcaactgcacccgccccaacaacaacacccgcaagtccatccgcatcggccccggccagaccttctacgccaccggcgacatcatcggcgacatccgccaggcccactgcaacatctccgagatcaagtggaacaagaccctgcagcgcgtgtccgagaagctgcgcgagcacttcaacaagaccatcatcttcaaccagtcctccggcggcgacctggagatcaccacccactacttcaactgcggcggcgagttcttctactgcaacacctccgacctgttcttcaacaagaccttcaacgagacctactccaccggctccaactccaccaactccaacatcaccctgccctgccgcatcaagcagatcatcaacatgtggcaggaggtgggccgctgcatgtacgcctcccccatcgccggcgagatcacctgcaagtccaacatcaccggcctgctgctgacccgcgacggcggcggcaacaactccaccgaggagaccttccgccccggcggcggcaacatgaaggacaactggcgctccgagctgtacaagtacaaggtggtgaagatcgagcccctgggcgtggcccccacccgctgcaagcgccgcgtggtgggccgccgccgccgccgccgcgccgtgggcatcggcgccgtgttcctgggcttcctgggcgccgccggctccaccatgggcgccgcctccatgaccctgaccgtgcaggcccgcaacctgctgtccggcatcgtgcagcagcagtccaacctgctgcgcgcccccgaggcccagcagcacctgctgaagctgaccgtgtggggcatcaagcagctgcaggcccgcgtgctggccgtggagcgctacctgcgcgaccagcagctgctgggcatctggggctgctccggcaagctgatctgctgcaccaacgtgccctggaactcctcctggtccaaccgcaacctgtccgagatctgggacaacatgacctggctgcagtgggacaaggagatctccaactacacccagatcatctacggcctgctggaggagtcccagaaccagcaggagaagaacgagcaggacctgctggccctggacggctccggcctgccctccaccggcggctaataaactagtagtgactgactaggatctggttaccactaaaccagcctcaagaacacccgaatggagtctctaagctacataataccaacttacacttacaaaatgttgtcccccaaaatgtagccattcgtatctgctcctaataaaaagaaagtttcttcacattctaaaaaaaaaaaaaaaaaaaaaaaaaaaaaaaaaaaaaaaaaaaaaaaaaaaaaaaaaaaaaaaaaaaaaaaaaaaaaaaaaaaaaaaaaaaaaaaaaaaaa

SEQ ID NO: 384 - DNA, 2379 bp, synthetic construct
  source 1..2379: mol_type = other DNA
agcataaaagtctcaacacaacatatacaaaacaaacgaatctcaagcaatcaagcattctacttctattgcagcaatttaaatcatttcttttaaagcaaaagcaattttctgaaaattttcaccatttacgaacgatagcgctgccaccatgggctggtcctgcatcatcctgttcctggtggccaccgccaccggcgtgcacgccggcctgtgggtgaccgtgtactacggcgtgcccgtgtggcgcgaggccaagaccaccctgttctgcgcctccgacgccaagtcctacgagaaggaggtgcacaacgtgtgggccacccacgcctgcgtgcccaccgaccccaacccccaggagctggtgctggagaacgtgaccgagaacttcaacatgtggaagaacgacatggtggaccagatgcacgaggacatcatctccctgtgggaccagtccctgaagccctgcgtgaagctgacccccctgtgcgtgaccctgcactgctccacctacaacaacacccacaacatctccaaggagatcaagaactgctccttcaacgccaccaccgagctgcgcgacaagaagcgcaaggagtacgccctgttctaccgcctggacatcgtgcccctgaacaagaacggccgccagtaccgcctgatcaactgcaacacctccgtgatcacccagatctgccccaaggtgaccttcgaccccatccccatccactactgcgcccccgccggctacgccatcctgaagtgcaacaacaagaccttcaacggcaccggcccctgcaacaacgtgtccaccgtgcagtgcacccacggcatcaagcccgtggtgtccacccagctgctgctgaacggctccctggccgaggaggagatcatcatccgctccgagaacctgaccgacaacgtgaagaccatcatcgtgcacctgaacgagtccgtggagatcaactgcacccgccccaacaacatgacccgcaagtccgtgcgcatcggccccggccagaccttctacgccctgggcgacatcatcggcgacatccgccagccccactgcaacatctccgagatcaagtggaacaagaccctgcagcgcgtgtccgagaagctgcgcgagcacttcaacaagaccatcatcttcaaccagtcctccggcggcgacctggagatcaccacccactccttcaactgcggcggcgagttcttctactgcaacacctccgacctgttcttcaacaagaccttcaacgagacctactccaccggctccaactccaccaactccaacatcaccctgccctgccgcatcaagcagatcatcaacatgtggcaggaggtgggccgcgccatgtacgccccccccatcgccggcaacatcacctgcaagtccaacatcaccggcctgctgctgacccgcgacggcggcggcaacaactccaccaaggagaccttccgccccggcggcggcaacatgcgcgacaactggcgctccgagctgtacaagtacaaggtggtggaggtgaagcccctgggcatcgcccccaccgagtgcaaccgcaccgtggtgcagctgaaccagcaggccgtgatcctgaaccagcaggccgtgatcgccgtggtgggcctgggcgccgtgttcctgggcttcctgggcgccgccggctccaccatgggcgccgcctccaacaccctgaccgtgcaggcccgccagctgctgtccggcatcgtgcagcagcagtccaacctgctgcgcgcccccgaggcccagcagcacatgctgcagctgggcgtgtggggcttcaagcagctgcaggcccgcgtgctggccatcgagcgctacctggaggtgcagcagctgctgggcatgtggggctgctccggcaagctgatctgctgcaccaacgtgccctggaactcctcctggtccaacaagacctacaacgagatctgggacaacatgacctggatgcagtgggaccgcgagatcggcaactacaccgacaccatctacaagctgctggaggtgtcccagttccagcaggagatcaacgagaaggacaacctgaccctggacctgcccgagaccggcggctaataaactagtagtgactgactaggatctggttaccactaaaccagcctcaagaacacccgaatggagtctctaagctacataataccaacttacacttacaaaatgttgtcccccaaaatgtagccattcgtatctgctcctaataaaaagaaagtttcttcacattctaaaaaaaaaaaaaaaaaaaaaaaaaaaaaaaaaaaaaaaaaaaaaaaaaaaaaaaaaaaaaaaaaaaaaaaaaaaaaaaaaaaaaaaaaaaaaaaaaaaaa

SEQ ID NO: 385 - DNA, 2355 bp, synthetic construct
  source 1..2355: mol_type = other DNA
agcataaaagtctcaacacaacatatacaaaacaaacgaatctcaagcaatcaagcattctacttctattgcagcaatttaaatcatttcttttaaagcaaaagcaattttctgaaaattttcaccatttacgaacgatagcgctgccaccatgggctggtcctgcatcatcctgttcctggtggccaccgccaccggcgtgcacgccggcctgtgggtgaccgtgtactacggcgtgcccgtgtggcgcgaggccaagaccaccctgttctgcgcctccgacgccaagtcctacgagaaggaggtgcacaacgtgtgggccacccacgcctgcgtgcccaccgaccccaacccccaggagctggtgctggagaacgtgaccgagaacttcaacatgtggaagaacgacatggtggaccagatgcacgaggacatcatctccctgtgggaccagtccctgaagccctgcgtgaagctgacccccctgtgcgtgaccctgcactgctccacctacaacaacacccacaacatctccaaggagatcaagaactgctccttcaacgccaccaccgagctgcgcaacaagaagcgcaaggagtacgccctgttctaccgcctggacatcgtgcccctgaacaagaacggccgccagtaccgcctgatcaactgcaacacctccgtgatcacccagatctgccccaaggtgaccttcgaccccatccccatccactactgcgcccccgccggctacgccatcctgaagtgcaacaacaagaccttcaacggcaccggcccctgcaacaacgtgtccaccgtgcagtgcacccacggcatcaagcccgtggtgtccacccagctgctgctgaacggctccctggccgaggaggagatcatcatccgctccgagaacctgaccgacaacgtgaagaccatcatcgtgcacctgaacgagtccgtggagatcaactgcacccgccccaacaacatgacccgcaagtccgtgcgcatcggccccggccagaccttctacgccctgggcgacatcatcggcgacatccgccagccccactgcaacatctccgagatcaagtggaacaagaccctgcagcgcgtgtccgagaagctgcgcgagcacttcaacaagaccatcatcttcaaccagtcctccggcggcgacctggagatcaccacccactccttcaactgcggcggcgagttcttctactgcaacacctccgacctgttcttcaacaagaccttcaacgagacctactccaccggctccaactccaccaactccaacatcaccctgccctgccgcatcaagcagatcatcaacatgtggcaggaggtgggccgcgccatgtacgccccccccatcgccggcaacatcacctgcaagtccaacatcaccggcctgctgctgacccgcgacggcggcggcaacaactccaccaaggagaccttccgccccggcggcggcaacatgcgcgacaactggcgctccgagctgtacaagtacaaggtggtggaggtgaagcccctgggcatcgcccccaccgagtgcaaccgcaccgtggtgcagcgccgccgccgccgccgcgccgtggtgggcctgggcgccgtgttcctgggcttcctgggcgccgccggctccaccatgggcgccgcctccaacaccctgaccgtgcaggcccgccagctgctgtccggcatcgtgcagcagcagtccaacctgctgcgcgcccccgaggcccagcagcacatgctgcagctgggcgtgtggggcttcaagcagctgcaggcccgcgtgctggccatcgagcgctacctggaggtgcagcagctgctgggcatgtggggctgctccggcaagctgatctgctgcaccaacgtgccctggaactcctcctggtccaacaagacctacaacgagatctgggacaacatgacctggatgcagtgggaccgcgagatcggcaactacaccgacaccatctacaagctgctggaggtgtcccagttccagcaggagatcaacgagaaggacaacctgaccctggacctgcccgagaccggcggctaataaactagtagtgactgactaggatctggttaccactaaaccagcctcaagaacacccgaatggagtctctaagctacataataccaacttacacttacaaaatgttgtcccccaaaatgtagccattcgtatctgctcctaataaaaagaaagtttcttcacattctaaaaaaaaaaaaaaaaaaaaaaaaaaaaaaaaaaaaaaaaaaaaaaaaaaaaaaaaaaaaaaaaaaaaaaaaaaaaaaaaaaaaaaaaaaaaaaaaaaaaa

SEQ ID NO: 386 - DNA, 2355 bp, synthetic construct
  source 1..2355: mol_type = other DNA
agcataaaagtctcaacacaacatatacaaaacaaacgaatctcaagcaatcaagcattctacttctattgcagcaatttaaatcatttcttttaaagcaaaagcaattttctgaaaattttcaccatttacgaacgatagcgctgccaccatgggctggtcctgcatcatcctgttcctggtggccaccgccaccggcgtgcacgccggcctgtgggtgaccgtgtactacggcgtgcccgtgtggcgcgaggccaagaccaccctgttctgcgcctccgacgccaagtcctacgagaaggaggtgcacaacgtgtgggccacccacgcctgcgtgcccaccgaccccaacccccaggagctggtgctggagaacgtgaccgagaacttcaacatgtggaagaacgacatggtggaccagatgcacgaggacatcatctccctgtgggaccagtccctgaagccctgcgtgaagctgacccccctgtgcgtgaccctgcactgctccacctacaacaacacccacaacatctccaaggagatcaagaactgctccttcaacgccaccaccgagctgcgcgacaagaagaagaaggagtacgccctgttctaccgcctggacatcgtgcccctgaacaagaacggccgccagtaccgcctgatcaactgcaacacctccgtgatcacccagatctgccccaaggtgaccttcgaccccatccccatccactactgcgcccccgccggctacgccatcctgaagtgcaacaacaagaccttcaacggcaccggcccctgcaacaacgtgtccaccgtgcagtgcacccacggcatcaagcccgtggtgtccacccagctgctgctgaacggctccctggccgaggaggagatcatcatccgctccgagaacctgaccgacaacgtgaagaccatcatcgtgcacctgaacgagtccgtggagatcaactgcacccgccccaacaacatgacccgcaagtccgtgcgcatcggccccggccagaccttctacgccctgggcgacatcatcggcgacatccgccagccccactgcaacatctccgagatcaagtggaacaagaccctgcagcgcgtgtccgagaagctgcgcgagcacttcaacaagaccatcatcttcaaccagtcctccggcggcgacctggagatcaccacccactccttcaactgcggcggcgagttcttctactgcaacacctccgacctgttcttcaacaagaccttcaacgagacctactccaccggctccaactccaccaactccaacatcaccctgccctgccgcatcaagcagatcatcaacatgtggcaggaggtgggccgcgccatgtacgccccccccatcgccggcaacatcacctgcaagtccaacatcaccggcctgctgctgacccgcgacggcggcggcaacaactccaccaaggagaccttccgccccggcggcggcaacatgcgcgacaactggcgctccgagctgtacaagtacaaggtggtggaggtgaagcccctgggcatcgcccccaccgagtgcaaccgcaccgtggtgcagcgccgccgccgccgccgcgccgtggtgggcctgggcgccgtgttcctgggcttcctgggcgccgccggctccaccatgggcgccgcctccaacaccctgaccgtgcaggcccgccagctgctgtccggcatcgtgcagcagcagtccaacctgctgcgcgcccccgaggcccagcagcacatgctgcagctgggcgtgtggggcttcaagcagctgcaggcccgcgtgctggccatcgagcgctacctggaggtgcagcagctgctgggcatgtggggctgctccggcaagctgatctgctgcaccaacgtgccctggaactcctcctggtccaacaagacctacaacgagatctgggacaacatgacctggatgcagtgggaccgcgagatcggcaactacaccgacaccatctacaagctgctggaggtgtcccagttccagcaggagatcaacgagaaggacaacctgaccctggacctgcccgagaccggcggctaataaactagtagtgactgactaggatctggttaccactaaaccagcctcaagaacacccgaatggagtctctaagctacataataccaacttacacttacaaaatgttgtcccccaaaatgtagccattcgtatctgctcctaataaaaagaaagtttcttcacattctaaaaaaaaaaaaaaaaaaaaaaaaaaaaaaaaaaaaaaaaaaaaaaaaaaaaaaaaaaaaaaaaaaaaaaaaaaaaaaaaaaaaaaaaaaaaaaaaaaaaa

SEQ ID NO: 387 - DNA, 2415 bp, synthetic construct
  source 1..2415: mol_type = other DNA
agcataaaagtctcaacacaacatatacaaaacaaacgaatctcaagcaatcaagcattctacttctattgcagcaatttaaatcatttcttttaaagcaaaagcaattttctgaaaattttcaccatttacgaacgatagcgctgccaccatgggctggtcctgcatcatcctgttcctggtggccaccgccaccggcgtgcacgccggcctgtgggtgaccgtgtactacggcgtgcccgtgtggcgcgaggccaagaccaccctgttctgcgcctccgacgccaagtcctacgagaaggaggtgcacaacgtgtgggccacccacgcctgcgtgcccaccgaccccaacccccaggagctggtgctggagaacgtgaccgagaacttcaacatgtggaagaacgacatggtggaccagatgcacgaggacatcatctccctgtgggaccagtccctgaagccctgcgtgaagctgacccccctgtgcgtgaccctgcactgctccacctacaacaacacccacaacatctccaaggagatcaagaactgctccttcaacgccaccaccgagctgcgcgacaagaagcgcaaggagtacgccctgttctaccgcctggacatcgtgcccctgaacaagaacggccgccagtaccgcctgatcaactgcaacacctccgtgatcacccagatctgccccaaggtgaccttcgaccccatccccatccactactgcgcccccgccggctacgccatcctgaagtgcaacaacaagaccttcaacggcaccggcccctgcaacaacgtgtccaccgtgcagtgcacccacggcatcaagcccgtggtgtccacccagctgctgctgaacggctccctggccgaggaggagatcatcatccgctccgagaacctgaccgacaacgtgaagaccatcatcgtgcacctgaacgagtccgtggagatcaactgcacccgccccaacaacatgacccgcaagtccgtgcgcatcggccccggccagaccttctacgccctgggcgacatcatcggcgacatccgccagccccactgcaacatctccgagatcaagtggaacaagaccctgcagcgcgtgtccgagaagctgcgcgagcacttcaacaagaccatcatcttcaaccagtcctccggcggcgacctggagatcaccacccactccttcaactgcggcggcgagttcttctactgcaacacctccgacctgttcttcaacaagaccttcaacgagacctactccaccggctccaactccaccaactccaacatcaccctgccctgccgcatcaagcagatcatcaacatgtggcaggaggtgggccgcgccatgtacgccccccccatcgccggcaacatcacctgcaagtccaacatcaccggcctgctgctgacccgcgacggcggcggcaacaactccaccaaggagaccttccgccccggcggcggcaacatgcgcgacaactggcgctccgagctgtacaagtacaaggtggtggaggtgaagcccctgggcatcgcccccaccgagtgcaaccgcaccgtggtgcagcgccgccgccgccgccgcgccgtggtgggcctgggcgccgtgttcctgggcttcctgggcgccgccggctccaccatgggcgccgcctccaacaccctgaccgtgcaggcccgccagctgctgtccggcatcgtgcagcagcagtccaacctgctgcgcgcccccgaggcccagcagcacatgctgcagctgggcgtgtggggcttcaagcagctgcaggcccgcgtgctggccatcgagcgctacctggaggtgcagcagctgctgggcatgtggggctgctccggcaagctgatctgctgcaccaacgtgccctggaactcctcctggtccaacaagacctacaacgagatctgggacaacatgacctggatgcagtgggaccgcgagatcggcaactacaccgacaccatctacaagctgctggaggtgtcccagttccagcaggagatcaacgagaaggacaacctgaccctggacggcggcggcctggtgccccagcagtccggcggcctgaacgacatcttcgaggcccagaagatcgagtggcacgagggctaataaactagtagtgactgactaggatctggttaccactaaaccagcctcaagaacacccgaatggagtctctaagctacataataccaacttacacttacaaaatgttgtcccccaaaatgtagccattcgtatctgctcctaataaaaagaaagtttcttcacattctaaaaaaaaaaaaaaaaaaaaaaaaaaaaaaaaaaaaaaaaaaaaaaaaaaaaaaaaaaaaaaaaaaaaaaaaaaaaaaaaaaaaaaaaaaaaaaaaaaaaa

SEQ ID NO: 388 - DNA, 2415 bp, synthetic construct
  source 1..2415: mol_type = other DNA
agcataaaagtctcaacacaacatatacaaaacaaacgaatctcaagcaatcaagcattctacttctattgcagcaatttaaatcatttcttttaaagcaaaagcaattttctgaaaattttcaccatttacgaacgatagcgctgccaccatgggctggtcctgcatcatcctgttcctggtggccaccgccaccggcgtgcacgccggcctgtgggtgaccgtgtactacggcgtgcccgtgtggcgcgaggccaagaccaccctgttctgcgcctccgacgccaagtcctacgagaaggaggtgcacaacgtgtgggccacccacgcctgcgtgcccaccgaccccaacccccaggagctggtgctggagaacgtgaccgagaacttcaacatgtggaagaacgacatggtggaccagatgcacgaggacatcatctccctgtgggaccagtccctgaagccctgcgtgaagctgacccccctgtgcgtgaccctgcactgctccacctacaacaacacccacaacatctccaaggagatcaagaactgctccttcaacgccaccaccgagctgcgcaacaagaagcgcaaggagtacgccctgttctaccgcctggacatcgtgcccctgaacaagaacggccgccagtaccgcctgatcaactgcaacacctccgtgatcacccagatctgccccaaggtgaccttcgaccccatccccatccactactgcgcccccgccggctacgccatcctgaagtgcaacaacaagaccttcaacggcaccggcccctgcaacaacgtgtccaccgtgcagtgcacccacggcatcaagcccgtggtgtccacccagctgctgctgaacggctccctggccgaggaggagatcatcatccgctccgagaacctgaccgacaacgtgaagaccatcatcgtgcacctgaacgagtccgtggagatcaactgcacccgccccaacaacatgacccgcaagtccgtgcgcatcggccccggccagaccttctacgccctgggcgacatcatcggcgacatccgccagccccactgcaacatctccgagatcaagtggaacaagaccctgcagcgcgtgtccgagaagctgcgcgagcacttcaacaagaccatcatcttcaaccagtcctccggcggcgacctggagatcaccacccactccttcaactgcggcggcgagttcttctactgcaacacctccgacctgttcttcaacaagaccttcaacgagacctactccaccggctccaactccaccaactccaacatcaccctgccctgccgcatcaagcagatcatcaacatgtggcaggaggtgggccgcgccatgtacgccccccccatcgccggcaacatcacctgcaagtccaacatcaccggcctgctgctgacccgcgacggcggcggcaacaactccaccaaggagaccttccgccccggcggcggcaacatgcgcgacaactggcgctccgagctgtacaagtacaaggtggtggaggtgaagcccctgggcatcgcccccaccgagtgcaaccgcaccgtggtgcagcgccgccgccgccgccgcgccgtggtgggcctgggcgccgtgttcctgggcttcctgggcgccgccggctccaccatgggcgccgcctccaacaccctgaccgtgcaggcccgccagctgctgtccggcatcgtgcagcagcagtccaacctgctgcgcgcccccgaggcccagcagcacatgctgcagctgggcgtgtggggcttcaagcagctgcaggcccgcgtgctggccatcgagcgctacctggaggtgcagcagctgctgggcatgtggggctgctccggcaagctgatctgctgcaccaacgtgccctggaactcctcctggtccaacaagacctacaacgagatctgggacaacatgacctggatgcagtgggaccgcgagatcggcaactacaccgacaccatctacaagctgctggaggtgtcccagttccagcaggagatcaacgagaaggacaacctgaccctggacggcggcggcctggtgccccagcagtccggcggcctgaacgacatcttcgaggcccagaagatcgagtggcacgagggctaataaactagtagtgactgactaggatctggttaccactaaaccagcctcaagaacacccgaatggagtctctaagctacataataccaacttacacttacaaaatgttgtcccccaaaatgtagccattcgtatctgctcctaataaaaagaaagtttcttcacattctaaaaaaaaaaaaaaaaaaaaaaaaaaaaaaaaaaaaaaaaaaaaaaaaaaaaaaaaaaaaaaaaaaaaaaaaaaaaaaaaaaaaaaaaaaaaaaaaaaaaa

SEQ ID NO: 389 - DNA, 2415 bp, synthetic construct
  source 1..2415: mol_type = other DNA
agcataaaagtctcaacacaacatatacaaaacaaacgaatctcaagcaatcaagcattctacttctattgcagcaatttaaatcatttcttttaaagcaaaagcaattttctgaaaattttcaccatttacgaacgatagcgctgccaccatgggctggtcctgcatcatcctgttcctggtggccaccgccaccggcgtgcacgccggcctgtgggtgaccgtgtactacggcgtgcccgtgtggcgcgaggccaagaccaccctgttctgcgcctccgacgccaagtcctacgagaaggaggtgcacaacgtgtgggccacccacgcctgcgtgcccaccgaccccaacccccaggagctggtgctggagaacgtgaccgagaacttcaacatgtggaagaacgacatggtggaccagatgcacgaggacatcatctccctgtgggaccagtccctgaagccctgcgtgaagctgacccccctgtgcgtgaccctgcactgctccacctacaacaacacccacaacatctccaaggagatcaagaactgctccttcaacgccaccaccgagctgcgcgacaagaagaagaaggagtacgccctgttctaccgcctggacatcgtgcccctgaacaagaacggccgccagtaccgcctgatcaactgcaacacctccgtgatcacccagatctgccccaaggtgaccttcgaccccatccccatccactactgcgcccccgccggctacgccatcctgaagtgcaacaacaagaccttcaacggcaccggcccctgcaacaacgtgtccaccgtgcagtgcacccacggcatcaagcccgtggtgtccacccagctgctgctgaacggctccctggccgaggaggagatcatcatccgctccgagaacctgaccgacaacgtgaagaccatcatcgtgcacctgaacgagtccgtggagatcaactgcacccgccccaacaacatgacccgcaagtccgtgcgcatcggccccggccagaccttctacgccctgggcgacatcatcggcgacatccgccagccccactgcaacatctccgagatcaagtggaacaagaccctgcagcgcgtgtccgagaagctgcgcgagcacttcaacaagaccatcatcttcaaccagtcctccggcggcgacctggagatcaccacccactccttcaactgcggcggcgagttcttctactgcaacacctccgacctgttcttcaacaagaccttcaacgagacctactccaccggctccaactccaccaactccaacatcaccctgccctgccgcatcaagcagatcatcaacatgtggcaggaggtgggccgcgccatgtacgccccccccatcgccggcaacatcacctgcaagtccaacatcaccggcctgctgctgacccgcgacggcggcggcaacaactccaccaaggagaccttccgccccggcggcggcaacatgcgcgacaactggcgctccgagctgtacaagtacaaggtggtggaggtgaagcccctgggcatcgcccccaccgagtgcaaccgcaccgtggtgcagcgccgccgccgccgccgcgccgtggtgggcctgggcgccgtgttcctgggcttcctgggcgccgccggctccaccatgggcgccgcctccaacaccctgaccgtgcaggcccgccagctgctgtccggcatcgtgcagcagcagtccaacctgctgcgcgcccccgaggcccagcagcacatgctgcagctgggcgtgtggggcttcaagcagctgcaggcccgcgtgctggccatcgagcgctacctggaggtgcagcagctgctgggcatgtggggctgctccggcaagctgatctgctgcaccaacgtgccctggaactcctcctggtccaacaagacctacaacgagatctgggacaacatgacctggatgcagtgggaccgcgagatcggcaactacaccgacaccatctacaagctgctggaggtgtcccagttccagcaggagatcaacgagaaggacaacctgaccctggacggcggcggcctggtgccccagcagtccggcggcctgaacgacatcttcgaggcccagaagatcgagtggcacgagggctaataaactagtagtgactgactaggatctggttaccactaaaccagcctcaagaacacccgaatggagtctctaagctacataataccaacttacacttacaaaatgttgtcccccaaaatgtagccattcgtatctgctcctaataaaaagaaagtttcttcacattctaaaaaaaaaaaaaaaaaaaaaaaaaaaaaaaaaaaaaaaaaaaaaaaaaaaaaaaaaaaaaaaaaaaaaaaaaaaaaaaaaaaaaaaaaaaaaaaaaaaaa

SEQ ID NO: 390 - DNA, 2637 bp, synthetic construct
  source 1..2637: mol_type = other DNA
agcataaaagtctcaacacaacatatacaaaacaaacgaatctcaagcaatcaagcattctacttctattgcagcaatttaaatcatttcttttaaagcaaaagcaattttctgaaaattttcaccatttacgaacgatagcgctgccaccatggactccaagggctcctcccagaagggctcccgcctgctgctgctgctggtggtgtccaacctgctgctgccccagggcgtgctggccctgtgggtgaccgtgtactacggcgtgcccgtgtggcgcgaggccaagaccaccctgttctgcgcctccgacgccaagtcctacgagaaggaggtggccaacatctgggccacccacgcctgcgtgcccaccgaccccaacccccaggagctggtgctgaagaacgtgaccgagaacttcaacatgtggaagaacgacatggtggaccagatgcacgaggacatcatctccctgtgggaccagtccctgaagccctgcgtgaagctgacccccctgtgcgtgaccctgcactgctccacctacaacaacacccacaacatctccaaggagatcaagaactgctccttcaacgccaccaccgagctgcgcgacaagcgccgcaaggagtacgccctgttctaccgcctggacatcgtgcccctgaacaagaacggccgccagtaccgcctgatcaactgcaacacctccgtgtgcacccaggtgtgccccaagctgaccttcgaccccatccccatccactactgcgcccccgccggctacgccatcctgaagtgcaacaacaagaccttcaacggcaccggcccctgcaacaacgtgtccaccgtgcagtgcacccacggcatcaagcccgtgctgtccacccagctgctgctgaacggctccctggccgaggaggagatcatcatccgctccgagaacctgaccgacaacgtgaagaccatcatcgtgcacctgaacgagtccgtggagatcaactgcacccgccccaacaacatgacccgcaagtccatccgcatcggccccggccagtggttctacgccctgggcgacatcatcggcgacatccgccagccccactgcaacatctccgagatcaagtggaacaagaccctgcagcgcgtgtccgagaagctgcgcgagcacttcaacaagaccatcatcttcaaccagtcctccggcggcgacctggagatcaccacccactccttcaactgcggcggcgagttcttctactgcaacacctccgacctgttcttcaacaagaccttcaacgagacctactccaccggctccaactccaccaactccaacatcaccctgccctgccgcatcaagcagatcatcaacatgtggcaggaggtgggccgctgcatgtacgccccccccatcgccggcaacatcacctgcaagtccaacatcaccggcctgctgctgacccgcgacggcggcggcaacaactccaccgaggagaccttccgccccggcggcggcaacatgcgcgacaactggcgctccgagctgtacaagtacaaggtggtggaggtgaagcccctgggcatcgcccccaccgagtgccgccgccgcgtggtgcagggcggcggcggctccggcggcggcggctccgccgtggtgggcctgggcgccgtgttcctgggcttcctgggcaccgccggctccaccatgggcgccgcctccatgaccctgaccgtgcaggcccgccagctgctgggctccgccggctccgccggctccggctccgccggctccggctccgccggctccggctccgccggctccaccgtgtggggcttcaagcagctgcaggcccgcgtgctggccatcgagcgctacctggaggtgcagcagctgctgggcatgtggggctgctccggcaagctgatctgctgcaccaacgtgccctggaactcctcctggtccaacaagacctacaacgagatctgggacaacatgacctggatgcagtgggaccgcgagatcggcaactacaccgacaccatctacaagctgctggaggtgtcccagttccagcaggagaagaacgagcaggacctgctggccctggactcctggaacaacctgtggaactggttcgacatctccaagtggctgtggtacatcaagatcttcatcatgatcgtgggcggcctgatcggcctgcgcatcatcttcgccgtgctgtccctggtgaaccgcgtgcgccagggcatctcccccctgtccttccagaccctgacccccaacccccgcgagctggaccgcctgggcggcatcgaggaggagggcggcgagcaggaccgcgaccgctccatccgcctggtgtcctaataaactagtagtgactgactaggatctggttaccactaaaccagcctcaagaacacccgaatggagtctctaagctacataataccaacttacacttacaaaatgttgtcccccaaaatgtagccattcgtatctgctcctaataaaaagaaagtttcttcacattctaaaaaaaaaaaaaaaaaaaaaaaaaaaaaaaaaaaaaaaaaaaaaaaaaaaaaaaaaaaaaaaaaaaaaaaaaaaaaaaaaaaaaaaaaaaaaaaaaaaaa

SEQ ID NO: 391 - DNA, 2943 bp, synthetic construct
  source 1..2943: mol_type = other DNA
agcataaaagtctcaacacaacatatacaaaacaaacgaatctcaagcaatcaagcattctacttctattgcagcaatttaaatcatttcttttaaagcaaaagcaattttctgaaaattttcaccatttacgaacgatagcgctgccaccatgggctggtcctgcatcatcctgttcctggtggccaccgccaccggcgtgcacgccctgtgggtgaccgtgtactacggcgtgcccgtgtggcgcgaggccaagaccaccctgttctgcgcctccgacgccaagtcctacgagaaggaggtgcacaacatctgggccacccacgcctgcgtgcccaccgaccccaacccccaggagctggtgctgaagaacgtgaccgagaacttcaacatgtggaagaacgacatggtggaccagatgcacgaggacatcatctccctgtgggaccagtccctgaagccctgcgtgaagctgacccccctgtgcgtgaccctgcactgctccacctacaacaacacccacaacatctccaaggagatcaagaactgctccttcaacgccaccaccgagctgcgcaacaagcgccgcaaggagtacgccctgttctaccgcctggacatcgtgcccctgaacaagaacggccgccagtaccgcctgatcaactgcaacacctccgtgatcacccaggtgtgccccaagctgaccttcgaccccatccccatccactactgcgcccccgccggctacgccatcctgaagtgcaacaacaagaccttcaacggcaccggcccctgcaacaacgtgtccaccgtgcagtgcacccacggcatcaagcccgtgctgtccacccagctgctgctgaacggctccctggccgaggaggagatcatcatccgctccgagaacctgaccgacaacgtgaagaccatcatcgtgcacctgaacgagtccgtggagatcaactgcacccgccccaacaacaacacccgcaagtccatccgcatcggccccggccagaccttctacgccaccggcgacatcatcggcgacatccgccaggcccactgcaacatctccgagatcaagtggaacaagaccctgcagcgcgtgtccgagaagctgcgcgagcacttcaacaagaccatcatcttcaaccagtcctccggcggcgacctggagatcaccacccactccttcaactgcggcggcgagttcttctactgcaacacctccgacctgttcttcaacaagaccttcaacgagacctactccaccggctccaactccaccaactccaacatcaccctgccctgccgcatcaagcagatcatcaacatgtggcaggaggtgggccgcgccatgtacgcctcccccatcgccggcgagatcacctgcaagtccaacatcaccggcctgctgctgacccgcgacggcggcggcaacaactccaccgaggagaccttccgccccggcggcggcaacatgcgcgacaactggcgctccgagctgtacaagtacaaggtggtggaggtgaagcccctgggcatcgcccccaccgagtgccgccgccgcgtggtgcagggcggcggcggctccggcggcggcggctccgccgtggtgggcctgggcgccgtgttcctgggcttcctgggcaccgccggctccaccatgggcgccgcctccatgaccctgaccgtgcaggcccgccagctgctgggctccgccggctccgccggctccggctccgccggctccggctccgccggctccggctccgccggctccaccgtgtggggcatcaagcagctgcaggcccgcgtgctggccatcgagcgctacctgaaggaccagcagctgctgggcatgtggggctgctccggcaagctgatctgctgcaccaacgtgtactggaactcctcctggtccaacaagacctacaacgagatctgggacaacatgacctggatgcagtgggaccgcgagatcgacaactacaccgacaccatctacaagctgctggaggtgtcccagaagcagcaggagtccaacgagaaggacctgctggccctggactcctggaacaacctgtggaactggttcgacatctccaagtggctgtggtacatcaagatcttcatcatgatcgtgggcggcctgatcggcctgcgcatcatcttcgccgtgctgtccctggtgaaccgcgtgcgccagggcatctcccccctgtccttccagaccctgacccccaacccccgcgagctggaccgcctgggcggcatcgaggaggagggcggcgagcaggaccgcgaccgctccatccgcctggtgtccggcttcttctccctggcctggaacgacctgcgctccctgtgcctgttctgctaccaccgcctgcgcgacttcatcctgatcgccggccgcgccgtggagctgctgggccgctcctccctgcagggcctgcagcgcggctgggagatcctgaagtacctgggctccctggtgcagtactggggcctggagctgaagaagtccgccatcaacctgttcgacaccatcgccatcgccgtggccgagggcaccgaccgcatcatcgagttcctgcagcgcatcgtgcgcgccatcctgcacatcccccgccgcatccgccagggcttcgaggccgccctgcagtaataaactagtagtgactgactaggatctggttaccactaaaccagcctcaagaacacccgaatggagtctctaagctacataataccaacttacacttacaaaatgttgtcccccaaaatgtagccattcgtatctgctcctaataaaaagaaagtttcttcacattctaaaaaaaaaaaaaaaaaaaaaaaaaaaaaaaaaaaaaaaaaaaaaaaaaaaaaaaaaaaaaaaaaaaaaaaaaaaaaaaaaaaaaaaaaaaaaaaaaaaaa

SEQ ID NO: 392 - DNA, 2943 bp, synthetic construct
  source 1..2943: mol_type = other DNA
agcataaaagtctcaacacaacatatacaaaacaaacgaatctcaagcaatcaagcattctacttctattgcagcaatttaaatcatttcttttaaagcaaaagcaattttctgaaaattttcaccatttacgaacgatagcgctgccaccatgggctggtcctgcatcatcctgttcctggtggccaccgccaccggcgtgcacgccctgtgggtgaccgtgtactacggcgtgcccgtgtggcgcgaggccaagaccaccctgttctgcgcctccgacgccaagtcctacgagaaggaggtgcacaacatctgggccacccacgcctgcgtgcccaccgaccccaacccccaggagctggtgctgaagaacgtgaccgagaacttcaacatgtggaagaacgacatggtggaccagatgcacgaggacatcatctccctgtgggaccagtccctgaagccctgcgtgaagctgacccccctgtgcgtgaccctgcactgctccacctacaacaacacccacaacatctccaaggagatcaagaactgctccttcaacgccaccaccgagctgcgcaacaagcgccgcaaggagtacgccctgttctaccgcctggacatcgtgcccctgaacaagaacggccgccagtaccgcctgatcaactgcaacacctccgtgtgcacccaggtgtgccccaagctgaccttcgaccccatccccatccactactgcgcccccgccggctacgccatcctgaagtgcaacaacaagaccttcaacggcaccggcccctgcaacaacgtgtccaccgtgcagtgcacccacggcatcaagcccgtgctgtccacccagctgctgctgaacggctccctggccgaggaggagatcatcatccgctccgagaacctgaccgacaacgtgaagaccatcatcgtgcacctgaacgagtccgtggagatcaactgcacccgccccaacaacaacacccgcaagtccatccgcatcggccccggccagaccttctacgccaccggcgacatcatcggcgacatccgccaggcccactgcaacatctccgagatcaagtggaacaagaccctgcagcgcgtgtccgagaagctgcgcgagcacttcaacaagaccatcatcttcaaccagtcctccggcggcgacctggagatcaccacccactccttcaactgcggcggcgagttcttctactgcaacacctccgacctgttcttcaacaagaccttcaacgagacctactccaccggctccaactccaccaactccaacatcaccctgccctgccgcatcaagcagatcatcaacatgtggcaggaggtgggccgctgcatgtacgcctcccccatcgccggcgagatcacctgcaagtccaacatcaccggcctgctgctgacccgcgacggcggcggcaacaactccaccgaggagaccttccgccccggcggcggcaacatgcgcgacaactggcgctccgagctgtacaagtacaaggtggtggaggtgaagcccctgggcatcgcccccaccgagtgccgccgccgcgtggtgcagggcggcggcggctccggcggcggcggctccgccgtggtgggcctgggcgccgtgttcctgggcttcctgggcaccgccggctccaccatgggcgccgcctccatgaccctgaccgtgcaggcccgccagctgctgggctccgccggctccgccggctccggctccgccggctccggctccgccggctccggctccgccggctccaccgtgtggggcatcaagcagctgcaggcccgcgtgctggccatcgagcgctacctgaaggaccagcagctgctgggcatgtggggctgctccggcaagctgatctgctgcaccaacgtgtactggaactcctcctggtccaacaagacctacaacgagatctgggacaacatgacctggatgcagtgggaccgcgagatcgacaactacaccgacaccatctacaagctgctggaggtgtcccagaagcagcaggagtccaacgagaaggacctgctggccctggactcctggaacaacctgtggaactggttcgacatctccaagtggctgtggtacatcaagatcttcatcatgatcgtgggcggcctgatcggcctgcgcatcatcttcgccgtgctgtccctggtgaaccgcgtgcgccagggcatctcccccctgtccttccagaccctgacccccaacccccgcgagctggaccgcctgggcggcatcgaggaggagggcggcgagcaggaccgcgaccgctccatccgcctggtgtccggcttcttctccctggcctggaacgacctgcgctccctgtgcctgttctgctaccaccgcctgcgcgacttcatcctgatcgccggccgcgccgtggagctgctgggccgctcctccctgcagggcctgcagcgcggctgggagatcctgaagtacctgggctccctggtgcagtactggggcctggagctgaagaagtccgccatcaacctgttcgacaccatcgccatcgccgtggccgagggcaccgaccgcatcatcgagttcctgcagcgcatcgtgcgcgccatcctgcacatcccccgccgcatccgccagggcttcgaggccgccgccgcctaataaactagtagtgactgactaggatctggttaccactaaaccagcctcaagaacacccgaatggagtctctaagctacataataccaacttacacttacaaaatgttgtcccccaaaatgtagccattcgtatctgctcctaataaaaagaaagtttcttcacattctaaaaaaaaaaaaaaaaaaaaaaaaaaaaaaaaaaaaaaaaaaaaaaaaaaaaaaaaaaaaaaaaaaaaaaaaaaaaaaaaaaaaaaaaaaaaaaaaaaaaa

SEQ ID NO: 393 - DNA, 2943 bp, synthetic construct
  source 1..2943: mol_type = other DNA
agcataaaagtctcaacacaacatatacaaaacaaacgaatctcaagcaatcaagcattctacttctattgcagcaatttaaatcatttcttttaaagcaaaagcaattttctgaaaattttcaccatttacgaacgatagcgctgccaccatgggctggtcctgcatcatcctgttcctggtggccaccgccaccggcgtgcacgccctgtgggtgaccgtgtactacggcgtgcccgtgtggcgcgaggccaagaccaccctgttctgcgcctccgacgccaagtcctacgagaaggaggtgcacaacatctgggccacccacgcctgcgtgcccaccgaccccaacccccaggagctggtgctgaagaacgtgaccgagaacttcaacatgtggaagaacgacatggtggaccagatgcacgaggacatcatctccctgtgggaccagtccctgaagccctgcgtgaagctgacccccctgtgcgtgaccctgcactgctccacctacaacaacacccacaacatctccaaggagatcaagaactgctccttcaacgccaccaccgagctgcgcaacaagcgccgcaaggagtacgccctgttctaccgcctggacatcgtgcccctgaacaagaacggccgccagtaccgcctgatcaactgcaacacctccgtgtgcacccaggtgtgccccaagctgaccttcgaccccatccccatccactactgcgcccccgccggctacgccatcctgaagtgcaacaacaagaccttcaacggcaccggcccctgcaacaacgtgtccaccgtgcagtgcacccacggcatcaagcccgtgctgtccacccagctgctgctgaacggctccctggccgaggaggagatcatcatccgctccgagaacctgaccgacaacgtgaagaccatcatcgtgcacctgaacgagtccgtggagatcaactgcacccgccccaacaacaacatgcgcaagtccatccgcatcggccccggccagaccttctacgccctgggcgacatcatcggcgacatccgccagccccactgcaacatctccgagatcaagtggaacaagaccctgcagcgcgtgtccgagaagctgcgcgagcacttcaacaagaccatcatcttcaaccagtcctccggcggcgacctggagatcaccacccactccttcaactgcggcggcgagttcttctactgcaacacctccgacctgttcttcaacaagaccttcaacgagacctactccaccggctccaactccaccaactccaacatcaccctgccctgccgcatcaagcagatcatcaacatgtggcaggaggtgggccgctgcatgtacgccccccccatcgccggcaacatcacctgcaagtccaacatcaccggcctgctgctgacccgcgacggcggcggcaacaactccaccgaggagaccttccgccccggcggcggcaacatgcgcgacaactggcgctccgagctgtacaagtacaaggtggtggaggtgaagcccctgggcatcgcccccaccgagtgccgccgccgcgtggtgcagggcggcggcggctccggcggcggcggctccgccgtggtgggcctgggcgccgtgttcctgggcttcctgggcaccgccggctccaccatgggcgccgcctccatgaccctgaccgtgcaggcccgccagctgctgggctccgccggctccgccggctccggctccgccggctccggctccgccggctccggctccgccggctccaccgtgtggggcttcaagcagctgcaggcccgcgtgctggccatcgagcgctacctggaggtgcagcagctgctgggcatgtggggctgctccggcaagctgatctgctgcaccaacgtgccctggaactcctcctggtccaacaagacctacaacgagatctgggacaacatgacctggatgcagtgggaccgcgagatcggcaactacaccgacaccatctacaagctgctggaggtgtcccagttccagcaggagatcaacgagaaggacctgctggccctggactcctggaacaacctgtggaactggttcgacatctccaagtggctgtggtacatcaagatcttcatcatgatcgtgggcggcctgatcggcctgcgcatcatcttcgccgtgctgtccctggtgaaccgcgtgcgccagggcatctcccccctgtccttccagaccctgacccccaacccccgcgagctggaccgcctgggcggcatcgaggaggagggcggcgagcaggaccgcgaccgctccatccgcctggtgtccggcttcttctccctggcctggaacgacctgcgctccctgtgcctgttctgctaccaccgcctgcgcgacttcatcctgatcgccggccgcgccgtggagctgctgggccgctcctccctgcagggcctgcagcgcggctgggagatcctgaagtacctgggctccctggtgcagtactggggcctggagctgaagaagtccgccatcaacctgttcgacaccatcgccatcgccgtggccgagggcaccgaccgcatcatcgagttcctgcagcgcatcgtgcgcgccatcctgcacatcccccgccgcatccgccagggcttcgaggccgccgccgcctaataaactagtagtgactgactaggatctggttaccactaaaccagcctcaagaacacccgaatggagtctctaagctacataataccaacttacacttacaaaatgttgtcccccaaaatgtagccattcgtatctgctcctaataaaaagaaagtttcttcacattctaaaaaaaaaaaaaaaaaaaaaaaaaaaaaaaaaaaaaaaaaaaaaaaaaaaaaaaaaaaaaaaaaaaaaaaaaaaaaaaaaaaaaaaaaaaaaaaaaaaaa

SEQ ID NO: 394 - DNA, 2943 bp, synthetic construct
  source 1..2943: mol_type = other DNA
agcataaaagtctcaacacaacatatacaaaacaaacgaatctcaagcaatcaagcattctacttctattgcagcaatttaaatcatttcttttaaagcaaaagcaattttctgaaaattttcaccatttacgaacgatagcgctgccaccatgggctggtcctgcatcatcctgttcctggtggccaccgccaccggcgtgcacgccctgtgggtgaccgtgtactacggcgtgcccgtgtggcgcgaggccaagaccaccctgttctgcgcctccgacgccaagtcctacgagaaggaggtggccaacatctgggccacccacgcctgcgtgcccaccgaccccaacccccaggagctggtgctgaagaacgtgaccgagaacttcaacatgtggaagaacgacatggtggaccagatgcacgaggacatcatctccctgtgggaccagtccctgaagccctgcgtgaagctgacccccctgtgcgtgaccctgcactgctccacctacaacaacacccacaacatctccaaggagatcaagaactgctccttcaacgccaccaccgagctgcgcaacaagcgccgcaaggagtacgccctgttctaccgcctggacatcgtgcccctgaacaagaacggccgccagtaccgcctgatcaactgcaacacctccgtgtgcacccaggtgtgccccaagctgaccttcgaccccatccccatccactactgcgcccccgccggctacgccatcctgaagtgcaacaacaagaccttcaacggcaccggcccctgcaacaacgtgtccaccgtgcagtgcacccacggcatcaagcccgtgctgtccacccagctgctgctgaacggctccctggccgaggaggagatcatcatccgctccgagaacctgaccgacaacgtgaagaccatcatcgtgcacctgaacgagtccgtggagatcaactgcacccgccccaacaacaacacccgcaagtccatccgcatcggccccggccagtggttctacgccaccggcgacatcatcggcgacatccgccaggcccactgcaacatctccgagatcaagtggaacaagaccctgcagcgcgtgtccgagaagctgcgcgagcacttcaacaagaccatcatcttcaaccagtcctccggcggcgacctggagatcaccacccactccttcaactgcggcggcgagttcttctactgcaacacctccgacctgttcttcaacaagaccttcaacgagacctactccaccggctccaactccaccaactccaacatcaccctgccctgccgcatcaagcagatcatcaacatgtggcaggaggtgggccgctgcatgtacgcctcccccatcgccggcgagatcacctgcaagtccaacatcaccggcctgctgctgacccgcgacggcggcggcaacaactccaccgaggagaccttccgccccggcggcggcaacatgcgcgacaactggcgctccgagctgtacaagtacaaggtggtggaggtgaagcccctgggcatcgcccccaccgagtgccgccgccgcgtggtgcagggcggcggcggctccggcggcggcggctccgccgtggtgggcctgggcgccgtgttcctgggcttcctgggcaccgccggctccaccatgggcgccgcctccatgaccctgaccgtgcaggcccgccagctgctgggctccgccggctccgccggctccggctccgccggctccggctccgccggctccggctccgccggctccaccgtgtggggcatcaagcagctgcaggcccgcgtgctggccatcgagcgctacctgaaggaccagcagctgctgggcatgtggggctgctccggcaagctgatctgctgcaccaacgtgtactggaactcctcctggtccaacaagacctacaacgagatctgggacaacatgacctggatgcagtgggaccgcgagatcgacaactacaccgacaccatctacaagctgctggaggtgtcccagaagcagcaggagaagaacgagcaggacctgctggccctggactcctggaacaacctgtggaactggttcgacatctccaagtggctgtggtacatcaagatcttcatcatgatcgtgggcggcctgatcggcctgcgcatcatcttcgccgtgctgtccctggtgaaccgcgtgcgccagggcatctcccccctgtccttccagaccctgacccccaacccccgcgagctggaccgcctgggcggcatcgaggaggagggcggcgagcaggaccgcgaccgctccatccgcctggtgtccggcttcttctccctggcctggaacgacctgcgctccctgtgcctgttctgctaccaccgcctgcgcgacttcatcctgatcgccggccgcgccgtggagctgctgggccgctcctccctgcagggcctgcagcgcggctgggagatcctgaagtacctgggctccctggtgcagtactggggcctggagctgaagaagtccgccatcaacctgttcgacaccatcgccatcgccgtggccgagggcaccgaccgcatcatcgagttcctgcagcgcatcgtgcgcgccatcctgcacatcccccgccgcatccgccagggcttcgaggccgccgccgcctaataaactagtagtgactgactaggatctggttaccactaaaccagcctcaagaacacccgaatggagtctctaagctacataataccaacttacacttacaaaatgttgtcccccaaaatgtagccattcgtatctgctcctaataaaaagaaagtttcttcacattctaaaaaaaaaaaaaaaaaaaaaaaaaaaaaaaaaaaaaaaaaaaaaaaaaaaaaaaaaaaaaaaaaaaaaaaaaaaaaaaaaaaaaaaaaaaaaaaaaaaaa

SEQ ID NO: 395 - DNA, 2943 bp, synthetic construct
  source 1..2943: mol_type = other DNA
agcataaaagtctcaacacaacatatacaaaacaaacgaatctcaagcaatcaagcattctacttctattgcagcaatttaaatcatttcttttaaagcaaaagcaattttctgaaaattttcaccatttacgaacgatagcgctgccaccatgggctggtcctgcatcatcctgttcctggtggccaccgccaccggcgtgcacgccctgtgggtgaccgtgtactacggcgtgcccgtgtggcgcgaggccaagaccaccctgttctgcgcctccgacgccaagtcctacgagaaggaggtggccaacatctgggccacccacgcctgcgtgcccaccgaccccaacccccaggagctggtgctgaagaacgtgaccgagaacttcaacatgtggaagaacgacatggtggaccagatgcacgaggacatcatctccctgtgggaccagtccctgaagccctgcgtgaagctgacccccctgtgcgtgaccctgcactgctccacctacaacaacacccacaacatctccaaggagatcaagaactgctccttcaacgccaccaccgagctgcgcaacaagcgccgcaaggagtacgccctgttctaccgcctggacatcgtgcccctgaacaagaacggccgccagtaccgcctgatcaactgcaacacctccgtgtgcacccaggtgtgccccaagctgaccttcgaccccatccccatccactactgcgcccccgccggctacgccatcctgaagtgcaacaacaagaccttcaacggcaccggcccctgcaacaacgtgtccaccgtgcagtgcacccacggcatcaagcccgtgctgtccacccagctgctgctgaacggctccctggccgaggaggagatcatcatccgctccgagaacctgaccgacaacgtgaagaccatcatcgtgcacctgaacgagtccgtggagatcaactgcacccgccccaacaacatgacccgcaagtccatccgcatcggccccggccagtggttctacgccctgggcgacatcatcggcgacatccgccagccccactgcaacatctccgagatcaagtggaacaagaccctgcagcgcgtgtccgagaagctgcgcgagcacttcaacaagaccatcatcttcaaccagtcctccggcggcgacctggagatcaccacccactccttcaactgcggcggcgagttcttctactgcaacacctccgacctgttcttcaacaagaccttcaacgagacctactccaccggctccaactccaccaactccaacatcaccctgccctgccgcatcaagcagatcatcaacatgtggcaggaggtgggccgctgcatgtacgccccccccatcgccggcaacatcacctgcaagtccaacatcaccggcctgctgctgacccgcgacggcggcggcaacaactccaccgaggagaccttccgccccggcggcggcaacatgcgcgacaactggcgctccgagctgtacaagtacaaggtggtggaggtgaagcccctgggcatcgcccccaccgagtgccgccgccgcgtggtgcagggcggcggcggctccggcggcggcggctccgccgtggtgggcctgggcgccgtgttcctgggcttcctgggcaccgccggctccaccatgggcgccgcctccatgaccctgaccgtgcaggcccgccagctgctgggctccgccggctccgccggctccggctccgccggctccggctccgccggctccggctccgccggctccaccgtgtggggcttcaagcagctgcaggcccgcgtgctggccatcgagcgctacctggaggtgcagcagctgctgggcatgtggggctgctccggcaagctgatctgctgcaccaacgtgccctggaactcctcctggtccaacaagacctacaacgagatctgggacaacatgacctggatgcagtgggaccgcgagatcggcaactacaccgacaccatctacaagctgctggaggtgtcccagttccagcaggagaagaacgagcaggacctgctggccctggactcctggaacaacctgtggaactggttcgacatctccaagtggctgtggtacatcaagatcttcatcatgatcgtgggcggcctgatcggcctgcgcatcatcttcgccgtgctgtccctggtgaaccgcgtgcgccagggcatctcccccctgtccttccagaccctgacccccaacccccgcgagctggaccgcctgggcggcatcgaggaggagggcggcgagcaggaccgcgaccgctccatccgcctggtgtccggcttcttctccctggcctggaacgacctgcgctccctgtgcctgttctgctaccaccgcctgcgcgacttcatcctgatcgccggccgcgccgtggagctgctgggccgctcctccctgcagggcctgcagcgcggctgggagatcctgaagtacctgggctccctggtgcagtactggggcctggagctgaagaagtccgccatcaacctgttcgacaccatcgccatcgccgtggccgagggcaccgaccgcatcatcgagttcctgcagcgcatcgtgcgcgccatcctgcacatcccccgccgcatccgccagggcttcgaggccgccgccgcctaataaactagtagtgactgactaggatctggttaccactaaaccagcctcaagaacacccgaatggagtctctaagctacataataccaacttacacttacaaaatgttgtcccccaaaatgtagccattcgtatctgctcctaataaaaagaaagtttcttcacattctaaaaaaaaaaaaaaaaaaaaaaaaaaaaaaaaaaaaaaaaaaaaaaaaaaaaaaaaaaaaaaaaaaaaaaaaaaaaaaaaaaaaaaaaaaaaaaaaaaaaa

SEQ ID NO: 396 - DNA, 2490 bp, synthetic construct
  source 1..2490: mol_type = other DNA
agcataaaagtctcaacacaacatatacaaaacaaacgaatctcaagcaatcaagcattctacttctattgcagcaatttaaatcatttcttttaaagcaaaagcaattttctgaaaattttcaccatttacgaacgatagcgctgccaccatgggctggtcctgcatcatcctgttcctggtggccaccgccaccggcgtgcacgccctgtgggtgaccgtgtactacggcgtgcccgtgtggcgcgaggccaagaccaccctgttctgcgcctccgacgccaagtcctacgagaaggaggtgcacaacatctgggccacccacgcctgcgtgcccaccgaccccaacccccaggagctggtgctgaagaacgtgaccgagaacttcaacatgtggaagaacgacatggtggaccagatgcacgaggacatcatctccctgtgggaccagtccctgaagccctgcgtgaagctgacccccctgtgcgtgaccctgcactgctccacctacaacaacacccacaacatctccaaggagatcaagaactgctccttcaacgccaccaccgagctgcgcaacaagcgccgcaaggagtacgccctgttctaccgcctggacatcgtgcccctgaacaagaacggccgccagtaccgcctgatcaactgcaacacctccgtgatcacccaggtgtgccccaagctgaccttcgaccccatccccatccactactgcgcccccgccggctacgccatcctgaagtgcaacaacaagaccttcaacggcaccggcccctgcaacaacgtgtccaccgtgcagtgcacccacggcatcaagcccgtgctgtccacccagctgctgctgaacggctccctggccgaggaggagatcatcatccgctccgagaacctgaccgacaacgtgaagaccatcatcgtgcacctgaacgagtccgtggagatcaactgcacccgccccaacaacaacacccgcaagtccatccgcatcggccccggccagaccttctacgccaccggcgacatcatcggcgacatccgccaggcccactgcaacatctccgagatcaagtggaacaagaccctgcagcgcgtgtccgagaagctgcgcgagcacttcaacaagaccatcatcttcaaccagtcctccggcggcgacctggagatcaccacccactccttcaactgcggcggcgagttcttctactgcaacacctccgacctgttcttcaacaagaccttcaacgagacctactccaccggctccaactccaccaactccaacatcaccctgccctgccgcatcaagcagatcatcaacatgtggcaggaggtgggccgcgccatgtacgcctcccccatcgccggcgagatcacctgcaagtccaacatcaccggcctgctgctgacccgcgacggcggcggcaacaactccaccgaggagaccttccgccccggcggcggcaacatgcgcgacaactggcgctccgagctgtacaagtacaaggtggtggaggtgaagcccctgggcatcgcccccaccgagtgccgccgccgcgtggtgcagggcggcggcggctccggcggcggcggctccgccgtggtgggcctgggcgccgtgttcctgggcttcctgggcaccgccggctccaccatgggcgccgcctccatgaccctgaccgtgcaggcccgccagctgctgggctccgccggctccgccggctccggctccgccggctccggctccgccggctccggctccgccggctccaccgtgtggggcatcaagcagctgcaggcccgcgtgctggccatcgagcgctacctgaaggaccagcagctgctgggcatgtggggctgctccggcaagctgatctgctgcaccaacgtgtactggaactcctcctggtccaacaagacctacaacgagatctgggacaacatgacctggatgcagtgggaccgcgagatcgacaactacaccgacaccatctacaagctgctggaggtgtcccagaagcagcaggagtccaacgagaaggacctgctggccctggactcctggaacaacctgtggaactggttcgacatctccaagtggctgtggtacatcaagatcttcatcatgatcgtgggcggcctgatcggcctgcgcatcatcttcgccgtgctgtccctggtgaaccgcgtgcgccagggcatctaataaactagtagtgactgactaggatctggttaccactaaaccagcctcaagaacacccgaatggagtctctaagctacataataccaacttacacttacaaaatgttgtcccccaaaatgtagccattcgtatctgctcctaataaaaagaaagtttcttcacattctaaaaaaaaaaaaaaaaaaaaaaaaaaaaaaaaaaaaaaaaaaaaaaaaaaaaaaaaaaaaaaaaaaaaaaaaaaaaaaaaaaaaaaaaaaaaaaaaaaaaa

SEQ ID NO: 397 - DNA, 2490 bp, synthetic construct
  source 1..2490: mol_type = other DNA
agcataaaagtctcaacacaacatatacaaaacaaacgaatctcaagcaatcaagcattctacttctattgcagcaatttaaatcatttcttttaaagcaaaagcaattttctgaaaattttcaccatttacgaacgatagcgctgccaccatgggctggtcctgcatcatcctgttcctggtggccaccgccaccggcgtgcacgccctgtgggtgaccgtgtactacggcgtgcccgtgtggcgcgaggccaagaccaccctgttctgcgcctccgacgccaagtcctacgagaaggaggtgcacaacatctgggccacccacgcctgcgtgcccaccgaccccaacccccaggagctggtgctgaagaacgtgaccgagaacttcaacatgtggaagaacgacatggtggaccagatgcacgaggacatcatctccctgtgggaccagtccctgaagccctgcgtgaagctgacccccctgtgcgtgaccctgcactgctccacctacaacaacacccacaacatctccaaggagatcaagaactgctccttcaacgccaccaccgagctgcgcaacaagcgccgcaaggagtacgccctgttctaccgcctggacatcgtgcccctgaacaagaacggccgccagtaccgcctgatcaactgcaacacctccgtgtgcacccaggtgtgccccaagctgaccttcgaccccatccccatccactactgcgcccccgccggctacgccatcctgaagtgcaacaacaagaccttcaacggcaccggcccctgcaacaacgtgtccaccgtgcagtgcacccacggcatcaagcccgtgctgtccacccagctgctgctgaacggctccctggccgaggaggagatcatcatccgctccgagaacctgaccgacaacgtgaagaccatcatcgtgcacctgaacgagtccgtggagatcaactgcacccgccccaacaacaacacccgcaagtccatccgcatcggccccggccagaccttctacgccaccggcgacatcatcggcgacatccgccaggcccactgcaacatctccgagatcaagtggaacaagaccctgcagcgcgtgtccgagaagctgcgcgagcacttcaacaagaccatcatcttcaaccagtcctccggcggcgacctggagatcaccacccactccttcaactgcggcggcgagttcttctactgcaacacctccgacctgttcttcaacaagaccttcaacgagacctactccaccggctccaactccaccaactccaacatcaccctgccctgccgcatcaagcagatcatcaacatgtggcaggaggtgggccgctgcatgtacgcctcccccatcgccggcgagatcacctgcaagtccaacatcaccggcctgctgctgacccgcgacggcggcggcaacaactccaccgaggagaccttccgccccggcggcggcaacatgcgcgacaactggcgctccgagctgtacaagtacaaggtggtggaggtgaagcccctgggcatcgcccccaccgagtgccgccgccgcgtggtgcagggcggcggcggctccggcggcggcggctccgccgtggtgggcctgggcgccgtgttcctgggcttcctgggcaccgccggctccaccatgggcgccgcctccatgaccctgaccgtgcaggcccgccagctgctgggctccgccggctccgccggctccggctccgccggctccggctccgccggctccggctccgccggctccaccgtgtggggcatcaagcagctgcaggcccgcgtgctggccatcgagcgctacctgaaggaccagcagctgctgggcatgtggggctgctccggcaagctgatctgctgcaccaacgtgtactggaactcctcctggtccaacaagacctacaacgagatctgggacaacatgacctggatgcagtgggaccgcgagatcgacaactacaccgacaccatctacaagctgctggaggtgtcccagaagcagcaggagtccaacgagaaggacctgctggccctggactcctggaacaacctgtggaactggttcgacatctccaagtggctgtggtacatcaagatcttcatcatgatcgtgggcggcctgatcggcctgcgcatcatcttcgccgtgctgtccctggtgaaccgcgtgcgccagggcatctaataaactagtagtgactgactaggatctggttaccactaaaccagcctcaagaacacccgaatggagtctctaagctacataataccaacttacacttacaaaatgttgtcccccaaaatgtagccattcgtatctgctcctaataaaaagaaagtttcttcacattctaaaaaaaaaaaaaaaaaaaaaaaaaaaaaaaaaaaaaaaaaaaaaaaaaaaaaaaaaaaaaaaaaaaaaaaaaaaaaaaaaaaaaaaaaaaaaaaaaaaaa

SEQ ID NO: 398 - DNA, 2490 bp, synthetic construct
  source 1..2490: mol_type = other DNA
agcataaaagtctcaacacaacatatacaaaacaaacgaatctcaagcaatcaagcattctacttctattgcagcaatttaaatcatttcttttaaagcaaaagcaattttctgaaaattttcaccatttacgaacgatagcgctgccaccatgggctggtcctgcatcatcctgttcctggtggccaccgccaccggcgtgcacgccctgtgggtgaccgtgtactacggcgtgcccgtgtggcgcgaggccaagaccaccctgttctgcgcctccgacgccaagtcctacgagaaggaggtgcacaacatctgggccacccacgcctgcgtgcccaccgaccccaacccccaggagctggtgctgaagaacgtgaccgagaacttcaacatgtggaagaacgacatggtggaccagatgcacgaggacatcatctccctgtgggaccagtccctgaagccctgcgtgaagctgacccccctgtgcgtgaccctgcactgctccacctacaacaacacccacaacatctccaaggagatcaagaactgctccttcaacgccaccaccgagctgcgcaacaagcgccgcaaggagtacgccctgttctaccgcctggacatcgtgcccctgaacaagaacggccgccagtaccgcctgatcaactgcaacacctccgtgtgcacccaggtgtgccccaagctgaccttcgaccccatccccatccactactgcgcccccgccggctacgccatcctgaagtgcaacaacaagaccttcaacggcaccggcccctgcaacaacgtgtccaccgtgcagtgcacccacggcatcaagcccgtgctgtccacccagctgctgctgaacggctccctggccgaggaggagatcatcatccgctccgagaacctgaccgacaacgtgaagaccatcatcgtgcacctgaacgagtccgtggagatcaactgcacccgccccaacaacaacatgcgcaagtccatccgcatcggccccggccagaccttctacgccctgggcgacatcatcggcgacatccgccagccccactgcaacatctccgagatcaagtggaacaagaccctgcagcgcgtgtccgagaagctgcgcgagcacttcaacaagaccatcatcttcaaccagtcctccggcggcgacctggagatcaccacccactccttcaactgcggcggcgagttcttctactgcaacacctccgacctgttcttcaacaagaccttcaacgagacctactccaccggctccaactccaccaactccaacatcaccctgccctgccgcatcaagcagatcatcaacatgtggcaggaggtgggccgctgcatgtacgccccccccatcgccggcaacatcacctgcaagtccaacatcaccggcctgctgctgacccgcgacggcggcggcaacaactccaccgaggagaccttccgccccggcggcggcaacatgcgcgacaactggcgctccgagctgtacaagtacaaggtggtggaggtgaagcccctgggcatcgcccccaccgagtgccgccgccgcgtggtgcagggcggcggcggctccggcggcggcggctccgccgtggtgggcctgggcgccgtgttcctgggcttcctgggcaccgccggctccaccatgggcgccgcctccatgaccctgaccgtgcaggcccgccagctgctgggctccgccggctccgccggctccggctccgccggctccggctccgccggctccggctccgccggctccaccgtgtggggcttcaagcagctgcaggcccgcgtgctggccatcgagcgctacctggaggtgcagcagctgctgggcatgtggggctgctccggcaagctgatctgctgcaccaacgtgccctggaactcctcctggtccaacaagacctacaacgagatctgggacaacatgacctggatgcagtgggaccgcgagatcggcaactacaccgacaccatctacaagctgctggaggtgtcccagttccagcaggagatcaacgagaaggacctgctggccctggactcctggaacaacctgtggaactggttcgacatctccaagtggctgtggtacatcaagatcttcatcatgatcgtgggcggcctgatcggcctgcgcatcatcttcgccgtgctgtccctggtgaaccgcgtgcgccagggcatctaataaactagtagtgactgactaggatctggttaccactaaaccagcctcaagaacacccgaatggagtctctaagctacataataccaacttacacttacaaaatgttgtcccccaaaatgtagccattcgtatctgctcctaataaaaagaaagtttcttcacattctaaaaaaaaaaaaaaaaaaaaaaaaaaaaaaaaaaaaaaaaaaaaaaaaaaaaaaaaaaaaaaaaaaaaaaaaaaaaaaaaaaaaaaaaaaaaaaaaaaaaa

SEQ ID NO: 399 - DNA, 2490 bp, synthetic construct
  source 1..2490: mol_type = other DNA
agcataaaagtctcaacacaacatatacaaaacaaacgaatctcaagcaatcaagcattctacttctattgcagcaatttaaatcatttcttttaaagcaaaagcaattttctgaaaattttcaccatttacgaacgatagcgctgccaccatgggctggtcctgcatcatcctgttcctggtggccaccgccaccggcgtgcacgccctgtgggtgaccgtgtactacggcgtgcccgtgtggcgcgaggccaagaccaccctgttctgcgcctccgacgccaagtcctacgagaaggaggtggccaacatctgggccacccacgcctgcgtgcccaccgaccccaacccccaggagctggtgctgaagaacgtgaccgagaacttcaacatgtggaagaacgacatggtggaccagatgcacgaggacatcatctccctgtgggaccagtccctgaagccctgcgtgaagctgacccccctgtgcgtgaccctgcactgctccacctacaacaacacccacaacatctccaaggagatcaagaactgctccttcaacgccaccaccgagctgcgcaacaagcgccgcaaggagtacgccctgttctaccgcctggacatcgtgcccctgaacaagaacggccgccagtaccgcctgatcaactgcaacacctccgtgtgcacccaggtgtgccccaagctgaccttcgaccccatccccatccactactgcgcccccgccggctacgccatcctgaagtgcaacaacaagaccttcaacggcaccggcccctgcaacaacgtgtccaccgtgcagtgcacccacggcatcaagcccgtgctgtccacccagctgctgctgaacggctccctggccgaggaggagatcatcatccgctccgagaacctgaccgacaacgtgaagaccatcatcgtgcacctgaacgagtccgtggagatcaactgcacccgccccaacaacaacacccgcaagtccatccgcatcggccccggccagtggttctacgccaccggcgacatcatcggcgacatccgccaggcccactgcaacatctccgagatcaagtggaacaagaccctgcagcgcgtgtccgagaagctgcgcgagcacttcaacaagaccatcatcttcaaccagtcctccggcggcgacctggagatcaccacccactccttcaactgcggcggcgagttcttctactgcaacacctccgacctgttcttcaacaagaccttcaacgagacctactccaccggctccaactccaccaactccaacatcaccctgccctgccgcatcaagcagatcatcaacatgtggcaggaggtgggccgctgcatgtacgcctcccccatcgccggcgagatcacctgcaagtccaacatcaccggcctgctgctgacccgcgacggcggcggcaacaactccaccgaggagaccttccgccccggcggcggcaacatgcgcgacaactggcgctccgagctgtacaagtacaaggtggtggaggtgaagcccctgggcatcgcccccaccgagtgccgccgccgcgtggtgcagggcggcggcggctccggcggcggcggctccgccgtggtgggcctgggcgccgtgttcctgggcttcctgggcaccgccggctccaccatgggcgccgcctccatgaccctgaccgtgcaggcccgccagctgctgggctccgccggctccgccggctccggctccgccggctccggctccgccggctccggctccgccggctccaccgtgtggggcatcaagcagctgcaggcccgcgtgctggccatcgagcgctacctgaaggaccagcagctgctgggcatgtggggctgctccggcaagctgatctgctgcaccaacgtgtactggaactcctcctggtccaacaagacctacaacgagatctgggacaacatgacctggatgcagtgggaccgcgagatcgacaactacaccgacaccatctacaagctgctggaggtgtcccagaagcagcaggagaagaacgagcaggacctgctggccctggactcctggaacaacctgtggaactggttcgacatctccaagtggctgtggtacatcaagatcttcatcatgatcgtgggcggcctgatcggcctgcgcatcatcttcgccgtgctgtccctggtgaaccgcgtgcgccagggcatctaataaactagtagtgactgactaggatctggttaccactaaaccagcctcaagaacacccgaatggagtctctaagctacataataccaacttacacttacaaaatgttgtcccccaaaatgtagccattcgtatctgctcctaataaaaagaaagtttcttcacattctaaaaaaaaaaaaaaaaaaaaaaaaaaaaaaaaaaaaaaaaaaaaaaaaaaaaaaaaaaaaaaaaaaaaaaaaaaaaaaaaaaaaaaaaaaaaaaaaaaaaa

SEQ ID NO: 400 - DNA, 2490 bp, synthetic construct
  source 1..2490: mol_type = other DNA
agcataaaagtctcaacacaacatatacaaaacaaacgaatctcaagcaatcaagcattctacttctattgcagcaatttaaatcatttcttttaaagcaaaagcaattttctgaaaattttcaccatttacgaacgatagcgctgccaccatgggctggtcctgcatcatcctgttcctggtggccaccgccaccggcgtgcacgccctgtgggtgaccgtgtactacggcgtgcccgtgtggcgcgaggccaagaccaccctgttctgcgcctccgacgccaagtcctacgagaaggaggtggccaacatctgggccacccacgcctgcgtgcccaccgaccccaacccccaggagctggtgctgaagaacgtgaccgagaacttcaacatgtggaagaacgacatggtggaccagatgcacgaggacatcatctccctgtgggaccagtccctgaagccctgcgtgaagctgacccccctgtgcgtgaccctgcactgctccacctacaacaacacccacaacatctccaaggagatcaagaactgctccttcaacgccaccaccgagctgcgcaacaagcgccgcaaggagtacgccctgttctaccgcctggacatcgtgcccctgaacaagaacggccgccagtaccgcctgatcaactgcaacacctccgtgtgcacccaggtgtgccccaagctgaccttcgaccccatccccatccactactgcgcccccgccggctacgccatcctgaagtgcaacaacaagaccttcaacggcaccggcccctgcaacaacgtgtccaccgtgcagtgcacccacggcatcaagcccgtgctgtccacccagctgctgctgaacggctccctggccgaggaggagatcatcatccgctccgagaacctgaccgacaacgtgaagaccatcatcgtgcacctgaacgagtccgtggagatcaactgcacccgccccaacaacatgacccgcaagtccatccgcatcggccccggccagtggttctacgccctgggcgacatcatcggcgacatccgccagccccactgcaacatctccgagatcaagtggaacaagaccctgcagcgcgtgtccgagaagctgcgcgagcacttcaacaagaccatcatcttcaaccagtcctccggcggcgacctggagatcaccacccactccttcaactgcggcggcgagttcttctactgcaacacctccgacctgttcttcaacaagaccttcaacgagacctactccaccggctccaactccaccaactccaacatcaccctgccctgccgcatcaagcagatcatcaacatgtggcaggaggtgggccgctgcatgtacgccccccccatcgccggcaacatcacctgcaagtccaacatcaccggcctgctgctgacccgcgacggcggcggcaacaactccaccgaggagaccttccgccccggcggcggcaacatgcgcgacaactggcgctccgagctgtacaagtacaaggtggtggaggtgaagcccctgggcatcgcccccaccgagtgccgccgccgcgtggtgcagggcggcggcggctccggcggcggcggctccgccgtggtgggcctgggcgccgtgttcctgggcttcctgggcaccgccggctccaccatgggcgccgcctccatgaccctgaccgtgcaggcccgccagctgctgggctccgccggctccgccggctccggctccgccggctccggctccgccggctccggctccgccggctccaccgtgtggggcttcaagcagctgcaggcccgcgtgctggccatcgagcgctacctggaggtgcagcagctgctgggcatgtggggctgctccggcaagctgatctgctgcaccaacgtgccctggaactcctcctggtccaacaagacctacaacgagatctgggacaacatgacctggatgcagtgggaccgcgagatcggcaactacaccgacaccatctacaagctgctggaggtgtcccagttccagcaggagaagaacgagcaggacctgctggccctggactcctggaacaacctgtggaactggttcgacatctccaagtggctgtggtacatcaagatcttcatcatgatcgtgggcggcctgatcggcctgcgcatcatcttcgccgtgctgtccctggtgaaccgcgtgcgccagggcatctaataaactagtagtgactgactaggatctggttaccactaaaccagcctcaagaacacccgaatggagtctctaagctacataataccaacttacacttacaaaatgttgtcccccaaaatgtagccattcgtatctgctcctaataaaaagaaagtttcttcacattctaaaaaaaaaaaaaaaaaaaaaaaaaaaaaaaaaaaaaaaaaaaaaaaaaaaaaaaaaaaaaaaaaaaaaaaaaaaaaaaaaaaaaaaaaaaaaaaaaaaaa

SEQ ID NO: 401 - DNA, 2619 bp, synthetic construct
  source 1..2619: mol_type = other DNA
agcataaaagtctcaacacaacatatacaaaacaaacgaatctcaagcaatcaagcattctacttctattgcagcaatttaaatcatttcttttaaagcaaaagcaattttctgaaaattttcaccatttacgaacgatagcgctgccaccatgggctggtcctgcatcatcctgttcctggtggccaccgccaccggcgtgcacgccctgtgggtgaccgtgtactacggcgtgcccgtgtggcgcgaggccaagaccaccctgttctgcgcctccgacgccaagtcctacgagaaggaggtgcacaacatctgggccacccacgcctgcgtgcccaccgaccccaacccccaggagctggtgctgaagaacgtgaccgagaacttcaacatgtggaagaacgacatggtggaccagatgcacgaggacatcatctccctgtgggaccagtccctgaagccctgcgtgaagctgacccccctgtgcgtgaccctgcactgctccacctacaacaacacccacaacatctccaaggagatcaagaactgctccttcaacgccaccaccgagctgcgcaacaagcgccgcaaggagtacgccctgttctaccgcctggacatcgtgcccctgaacaagaacggccgccagtaccgcctgatcaactgcaacacctccgtgatcacccaggtgtgccccaagctgaccttcgaccccatccccatccactactgcgcccccgccggctacgccatcctgaagtgcaacaacaagaccttcaacggcaccggcccctgcaacaacgtgtccaccgtgcagtgcacccacggcatcaagcccgtgctgtccacccagctgctgctgaacggctccctggccgaggaggagatcatcatccgctccgagaacctgaccgacaacgtgaagaccatcatcgtgcacctgaacgagtccgtggagatcaactgcacccgccccaacaacaacacccgcaagtccatccgcatcggccccggccagaccttctacgccaccggcgacatcatcggcgacatccgccaggcccactgcaacatctccgagatcaagtggaacaagaccctgcagcgcgtgtccgagaagctgcgcgagcacttcaacaagaccatcatcttcaaccagtcctccggcggcgacctggagatcaccacccactccttcaactgcggcggcgagttcttctactgcaacacctccgacctgttcttcaacaagaccttcaacgagacctactccaccggctccaactccaccaactccaacatcaccctgccctgccgcatcaagcagatcatcaacatgtggcaggaggtgggccgcgccatgtacgcctcccccatcgccggcgagatcacctgcaagtccaacatcaccggcctgctgctgacccgcgacggcggcggcaacaactccaccgaggagaccttccgccccggcggcggcaacatgcgcgacaactggcgctccgagctgtacaagtacaaggtggtggaggtgaagcccctgggcatcgcccccaccgagtgccgccgccgcgtggtgcagggcggcggcggctccggcggcggcggctccgccgtggtgggcctgggcgccgtgttcctgggcttcctgggcaccgccggctccaccatgggcgccgcctccatgaccctgaccgtgcaggcccgccagctgctgggctccgccggctccgccggctccggctccgccggctccggctccgccggctccggctccgccggctccaccgtgtggggcatcaagcagctgcaggcccgcgtgctggccatcgagcgctacctgaaggaccagcagctgctgggcatgtggggctgctccggcaagctgatctgctgcaccaacgtgtactggaactcctcctggtccaacaagacctacaacgagatctgggacaacatgacctggatgcagtgggaccgcgagatcgacaactacaccgacaccatctacaagctgctggaggtgtcccagaagcagcaggagtccaacgagaaggacctgctggccctggactcctggaacaacctgtggaactggttcgacatctccaagtggctgtggtacatcaagatcttcatcatgatcgtgggcggcctgatcggcctgcgcatcatcttcgccgtgctgtccctggtgaaccgcgtgcgccagggcatctcccccctgtccttccagaccctgacccccaacccccgcgagctggaccgcctgggcggcatcgaggaggagggcggcgagcaggaccgcgaccgctccatccgcctggtgtccggcttcttctccctgtaataaactagtagtgactgactaggatctggttaccactaaaccagcctcaagaacacccgaatggagtctctaagctacataataccaacttacacttacaaaatgttgtcccccaaaatgtagccattcgtatctgctcctaataaaaagaaagtttcttcacattctaaaaaaaaaaaaaaaaaaaaaaaaaaaaaaaaaaaaaaaaaaaaaaaaaaaaaaaaaaaaaaaaaaaaaaaaaaaaaaaaaaaaaaaaaaaaaaaaaaaaa

SEQ ID NO: 402 - DNA, 2619 bp, synthetic construct
  source 1..2619: mol_type = other DNA
agcataaaagtctcaacacaacatatacaaaacaaacgaatctcaagcaatcaagcattctacttctattgcagcaatttaaatcatttcttttaaagcaaaagcaattttctgaaaattttcaccatttacgaacgatagcgctgccaccatgggctggtcctgcatcatcctgttcctggtggccaccgccaccggcgtgcacgccctgtgggtgaccgtgtactacggcgtgcccgtgtggcgcgaggccaagaccaccctgttctgcgcctccgacgccaagtcctacgagaaggaggtgcacaacatctgggccacccacgcctgcgtgcccaccgaccccaacccccaggagctggtgctgaagaacgtgaccgagaacttcaacatgtggaagaacgacatggtggaccagatgcacgaggacatcatctccctgtgggaccagtccctgaagccctgcgtgaagctgacccccctgtgcgtgaccctgcactgctccacctacaacaacacccacaacatctccaaggagatcaagaactgctccttcaacgccaccaccgagctgcgcaacaagcgccgcaaggagtacgccctgttctaccgcctggacatcgtgcccctgaacaagaacggccgccagtaccgcctgatcaactgcaacacctccgtgtgcacccaggtgtgccccaagctgaccttcgaccccatccccatccactactgcgcccccgccggctacgccatcctgaagtgcaacaacaagaccttcaacggcaccggcccctgcaacaacgtgtccaccgtgcagtgcacccacggcatcaagcccgtgctgtccacccagctgctgctgaacggctccctggccgaggaggagatcatcatccgctccgagaacctgaccgacaacgtgaagaccatcatcgtgcacctgaacgagtccgtggagatcaactgcacccgccccaacaacaacacccgcaagtccatccgcatcggccccggccagaccttctacgccaccggcgacatcatcggcgacatccgccaggcccactgcaacatctccgagatcaagtggaacaagaccctgcagcgcgtgtccgagaagctgcgcgagcacttcaacaagaccatcatcttcaaccagtcctccggcggcgacctggagatcaccacccactccttcaactgcggcggcgagttcttctactgcaacacctccgacctgttcttcaacaagaccttcaacgagacctactccaccggctccaactccaccaactccaacatcaccctgccctgccgcatcaagcagatcatcaacatgtggcaggaggtgggccgctgcatgtacgcctcccccatcgccggcgagatcacctgcaagtccaacatcaccggcctgctgctgacccgcgacggcggcggcaacaactccaccgaggagaccttccgccccggcggcggcaacatgcgcgacaactggcgctccgagctgtacaagtacaaggtggtggaggtgaagcccctgggcatcgcccccaccgagtgccgccgccgcgtggtgcagggcggcggcggctccggcggcggcggctccgccgtggtgggcctgggcgccgtgttcctgggcttcctgggcaccgccggctccaccatgggcgccgcctccatgaccctgaccgtgcaggcccgccagctgctgggctccgccggctccgccggctccggctccgccggctccggctccgccggctccggctccgccggctccaccgtgtggggcatcaagcagctgcaggcccgcgtgctggccatcgagcgctacctgaaggaccagcagctgctgggcatgtggggctgctccggcaagctgatctgctgcaccaacgtgtactggaactcctcctggtccaacaagacctacaacgagatctgggacaacatgacctggatgcagtgggaccgcgagatcgacaactacaccgacaccatctacaagctgctggaggtgtcccagaagcagcaggagtccaacgagaaggacctgctggccctggactcctggaacaacctgtggaactggttcgacatctccaagtggctgtggtacatcaagatcttcatcatgatcgtgggcggcctgatcggcctgcgcatcatcttcgccgtgctgtccctggtgaaccgcgtgcgccagggcatctcccccctgtccttccagaccctgacccccaacccccgcgagctggaccgcctgggcggcatcgaggaggagggcggcgagcaggaccgcgaccgctccatccgcctggtgtccggcttcttctccctgtaataaactagtagtgactgactaggatctggttaccactaaaccagcctcaagaacacccgaatggagtctctaagctacataataccaacttacacttacaaaatgttgtcccccaaaatgtagccattcgtatctgctcctaataaaaagaaagtttcttcacattctaaaaaaaaaaaaaaaaaaaaaaaaaaaaaaaaaaaaaaaaaaaaaaaaaaaaaaaaaaaaaaaaaaaaaaaaaaaaaaaaaaaaaaaaaaaaaaaaaaaaa

SEQ ID NO: 403 - DNA, 2619 bp, synthetic construct
  source 1..2619: mol_type = other DNA
agcataaaagtctcaacacaacatatacaaaacaaacgaatctcaagcaatcaagcattctacttctattgcagcaatttaaatcatttcttttaaagcaaaagcaattttctgaaaattttcaccatttacgaacgatagcgctgccaccatgggctggtcctgcatcatcctgttcctggtggccaccgccaccggcgtgcacgccctgtgggtgaccgtgtactacggcgtgcccgtgtggcgcgaggccaagaccaccctgttctgcgcctccgacgccaagtcctacgagaaggaggtgcacaacatctgggccacccacgcctgcgtgcccaccgaccccaacccccaggagctggtgctgaagaacgtgaccgagaacttcaacatgtggaagaacgacatggtggaccagatgcacgaggacatcatctccctgtgggaccagtccctgaagccctgcgtgaagctgacccccctgtgcgtgaccctgcactgctccacctacaacaacacccacaacatctccaaggagatcaagaactgctccttcaacgccaccaccgagctgcgcaacaagcgccgcaaggagtacgccctgttctaccgcctggacatcgtgcccctgaacaagaacggccgccagtaccgcctgatcaactgcaacacctccgtgtgcacccaggtgtgccccaagctgaccttcgaccccatccccatccactactgcgcccccgccggctacgccatcctgaagtgcaacaacaagaccttcaacggcaccggcccctgcaacaacgtgtccaccgtgcagtgcacccacggcatcaagcccgtgctgtccacccagctgctgctgaacggctccctggccgaggaggagatcatcatccgctccgagaacctgaccgacaacgtgaagaccatcatcgtgcacctgaacgagtccgtggagatcaactgcacccgccccaacaacaacatgcgcaagtccatccgcatcggccccggccagaccttctacgccctgggcgacatcatcggcgacatccgccagccccactgcaacatctccgagatcaagtggaacaagaccctgcagcgcgtgtccgagaagctgcgcgagcacttcaacaagaccatcatcttcaaccagtcctccggcggcgacctggagatcaccacccactccttcaactgcggcggcgagttcttctactgcaacacctccgacctgttcttcaacaagaccttcaacgagacctactccaccggctccaactccaccaactccaacatcaccctgccctgccgcatcaagcagatcatcaacatgtggcaggaggtgggccgctgcatgtacgccccccccatcgccggcaacatcacctgcaagtccaacatcaccggcctgctgctgacccgcgacggcggcggcaacaactccaccgaggagaccttccgccccggcggcggcaacatgcgcgacaactggcgctccgagctgtacaagtacaaggtggtggaggtgaagcccctgggcatcgcccccaccgagtgccgccgccgcgtggtgcagggcggcggcggctccggcggcggcggctccgccgtggtgggcctgggcgccgtgttcctgggcttcctgggcaccgccggctccaccatgggcgccgcctccatgaccctgaccgtgcaggcccgccagctgctgggctccgccggctccgccggctccggctccgccggctccggctccgccggctccggctccgccggctccaccgtgtggggcttcaagcagctgcaggcccgcgtgctggccatcgagcgctacctggaggtgcagcagctgctgggcatgtggggctgctccggcaagctgatctgctgcaccaacgtgccctggaactcctcctggtccaacaagacctacaacgagatctgggacaacatgacctggatgcagtgggaccgcgagatcggcaactacaccgacaccatctacaagctgctggaggtgtcccagttccagcaggagatcaacgagaaggacctgctggccctggactcctggaacaacctgtggaactggttcgacatctccaagtggctgtggtacatcaagatcttcatcatgatcgtgggcggcctgatcggcctgcgcatcatcttcgccgtgctgtccctggtgaaccgcgtgcgccagggcatctcccccctgtccttccagaccctgacccccaacccccgcgagctggaccgcctgggcggcatcgaggaggagggcggcgagcaggaccgcgaccgctccatccgcctggtgtccggcttcttctccctgtaataaactagtagtgactgactaggatctggttaccactaaaccagcctcaagaacacccgaatggagtctctaagctacataataccaacttacacttacaaaatgttgtcccccaaaatgtagccattcgtatctgctcctaataaaaagaaagtttcttcacattctaaaaaaaaaaaaaaaaaaaaaaaaaaaaaaaaaaaaaaaaaaaaaaaaaaaaaaaaaaaaaaaaaaaaaaaaaaaaaaaaaaaaaaaaaaaaaaaaaaaaa

SEQ ID NO: 404 - DNA, 2619 bp, synthetic construct
  source 1..2619: mol_type = other DNA
agcataaaagtctcaacacaacatatacaaaacaaacgaatctcaagcaatcaagcattctacttctattgcagcaatttaaatcatttcttttaaagcaaaagcaattttctgaaaattttcaccatttacgaacgatagcgctgccaccatgggctggtcctgcatcatcctgttcctggtggccaccgccaccggcgtgcacgccctgtgggtgaccgtgtactacggcgtgcccgtgtggcgcgaggccaagaccaccctgttctgcgcctccgacgccaagtcctacgagaaggaggtggccaacatctgggccacccacgcctgcgtgcccaccgaccccaacccccaggagctggtgctgaagaacgtgaccgagaacttcaacatgtggaagaacgacatggtggaccagatgcacgaggacatcatctccctgtgggaccagtccctgaagccctgcgtgaagctgacccccctgtgcgtgaccctgcactgctccacctacaacaacacccacaacatctccaaggagatcaagaactgctccttcaacgccaccaccgagctgcgcaacaagcgccgcaaggagtacgccctgttctaccgcctggacatcgtgcccctgaacaagaacggccgccagtaccgcctgatcaactgcaacacctccgtgtgcacccaggtgtgccccaagctgaccttcgaccccatccccatccactactgcgcccccgccggctacgccatcctgaagtgcaacaacaagaccttcaacggcaccggcccctgcaacaacgtgtccaccgtgcagtgcacccacggcatcaagcccgtgctgtccacccagctgctgctgaacggctccctggccgaggaggagatcatcatccgctccgagaacctgaccgacaacgtgaagaccatcatcgtgcacctgaacgagtccgtggagatcaactgcacccgccccaacaacaacacccgcaagtccatccgcatcggccccggccagtggttctacgccaccggcgacatcatcggcgacatccgccaggcccactgcaacatctccgagatcaagtggaacaagaccctgcagcgcgtgtccgagaagctgcgcgagcacttcaacaagaccatcatcttcaaccagtcctccggcggcgacctggagatcaccacccactccttcaactgcggcggcgagttcttctactgcaacacctccgacctgttcttcaacaagaccttcaacgagacctactccaccggctccaactccaccaactccaacatcaccctgccctgccgcatcaagcagatcatcaacatgtggcaggaggtgggccgctgcatgtacgcctcccccatcgccggcgagatcacctgcaagtccaacatcaccggcctgctgctgacccgcgacggcggcggcaacaactccaccgaggagaccttccgccccggcggcggcaacatgcgcgacaactggcgctccgagctgtacaagtacaaggtggtggaggtgaagcccctgggcatcgcccccaccgagtgccgccgccgcgtggtgcagggcggcggcggctccggcggcggcggctccgccgtggtgggcctgggcgccgtgttcctgggcttcctgggcaccgccggctccaccatgggcgccgcctccatgaccctgaccgtgcaggcccgccagctgctgggctccgccggctccgccggctccggctccgccggctccggctccgccggctccggctccgccggctccaccgtgtggggcatcaagcagctgcaggcccgcgtgctggccatcgagcgctacctgaaggaccagcagctgctgggcatgtggggctgctccggcaagctgatctgctgcaccaacgtgtactggaactcctcctggtccaacaagacctacaacgagatctgggacaacatgacctggatgcagtgggaccgcgagatcgacaactacaccgacaccatctacaagctgctggaggtgtcccagaagcagcaggagaagaacgagcaggacctgctggccctggactcctggaacaacctgtggaactggttcgacatctccaagtggctgtggtacatcaagatcttcatcatgatcgtgggcggcctgatcggcctgcgcatcatcttcgccgtgctgtccctggtgaaccgcgtgcgccagggcatctcccccctgtccttccagaccctgacccccaacccccgcgagctggaccgcctgggcggcatcgaggaggagggcggcgagcaggaccgcgaccgctccatccgcctggtgtccggcttcttctccctgtaataaactagtagtgactgactaggatctggttaccactaaaccagcctcaagaacacccgaatggagtctctaagctacataataccaacttacacttacaaaatgttgtcccccaaaatgtagccattcgtatctgctcctaataaaaagaaagtttcttcacattctaaaaaaaaaaaaaaaaaaaaaaaaaaaaaaaaaaaaaaaaaaaaaaaaaaaaaaaaaaaaaaaaaaaaaaaaaaaaaaaaaaaaaaaaaaaaaaaaaaaaa

SEQ ID NO: 405 - DNA, 2619 bp, synthetic construct
  source 1..2619: mol_type = other DNA
agcataaaagtctcaacacaacatatacaaaacaaacgaatctcaagcaatcaagcattctacttctattgcagcaatttaaatcatttcttttaaagcaaaagcaattttctgaaaattttcaccatttacgaacgatagcgctgccaccatgggctggtcctgcatcatcctgttcctggtggccaccgccaccggcgtgcacgccctgtgggtgaccgtgtactacggcgtgcccgtgtggcgcgaggccaagaccaccctgttctgcgcctccgacgccaagtcctacgagaaggaggtggccaacatctgggccacccacgcctgcgtgcccaccgaccccaacccccaggagctggtgctgaagaacgtgaccgagaacttcaacatgtggaagaacgacatggtggaccagatgcacgaggacatcatctccctgtgggaccagtccctgaagccctgcgtgaagctgacccccctgtgcgtgaccctgcactgctccacctacaacaacacccacaacatctccaaggagatcaagaactgctccttcaacgccaccaccgagctgcgcaacaagcgccgcaaggagtacgccctgttctaccgcctggacatcgtgcccctgaacaagaacggccgccagtaccgcctgatcaactgcaacacctccgtgtgcacccaggtgtgccccaagctgaccttcgaccccatccccatccactactgcgcccccgccggctacgccatcctgaagtgcaacaacaagaccttcaacggcaccggcccctgcaacaacgtgtccaccgtgcagtgcacccacggcatcaagcccgtgctgtccacccagctgctgctgaacggctccctggccgaggaggagatcatcatccgctccgagaacctgaccgacaacgtgaagaccatcatcgtgcacctgaacgagtccgtggagatcaactgcacccgccccaacaacatgacccgcaagtccatccgcatcggccccggccagtggttctacgccctgggcgacatcatcggcgacatccgccagccccactgcaacatctccgagatcaagtggaacaagaccctgcagcgcgtgtccgagaagctgcgcgagcacttcaacaagaccatcatcttcaaccagtcctccggcggcgacctggagatcaccacccactccttcaactgcggcggcgagttcttctactgcaacacctccgacctgttcttcaacaagaccttcaacgagacctactccaccggctccaactccaccaactccaacatcaccctgccctgccgcatcaagcagatcatcaacatgtggcaggaggtgggccgctgcatgtacgccccccccatcgccggcaacatcacctgcaagtccaacatcaccggcctgctgctgacccgcgacggcggcggcaacaactccaccgaggagaccttccgccccggcggcggcaacatgcgcgacaactggcgctccgagctgtacaagtacaaggtggtggaggtgaagcccctgggcatcgcccccaccgagtgccgccgccgcgtggtgcagggcggcggcggctccggcggcggcggctccgccgtggtgggcctgggcgccgtgttcctgggcttcctgggcaccgccggctccaccatgggcgccgcctccatgaccctgaccgtgcaggcccgccagctgctgggctccgccggctccgccggctccggctccgccggctccggctccgccggctccggctccgccggctccaccgtgtggggcttcaagcagctgcaggcccgcgtgctggccatcgagcgctacctggaggtgcagcagctgctgggcatgtggggctgctccggcaagctgatctgctgcaccaacgtgccctggaactcctcctggtccaacaagacctacaacgagatctgggacaacatgacctggatgcagtgggaccgcgagatcggcaactacaccgacaccatctacaagctgctggaggtgtcccagttccagcaggagaagaacgagcaggacctgctggccctggactcctggaacaacctgtggaactggttcgacatctccaagtggctgtggtacatcaagatcttcatcatgatcgtgggcggcctgatcggcctgcgcatcatcttcgccgtgctgtccctggtgaaccgcgtgcgccagggcatctcccccctgtccttccagaccctgacccccaacccccgcgagctggaccgcctgggcggcatcgaggaggagggcggcgagcaggaccgcgaccgctccatccgcctggtgtccggcttcttctccctgtaataaactagtagtgactgactaggatctggttaccactaaaccagcctcaagaacacccgaatggagtctctaagctacataataccaacttacacttacaaaatgttgtcccccaaaatgtagccattcgtatctgctcctaataaaaagaaagtttcttcacattctaaaaaaaaaaaaaaaaaaaaaaaaaaaaaaaaaaaaaaaaaaaaaaaaaaaaaaaaaaaaaaaaaaaaaaaaaaaaaaaaaaaaaaaaaaaaaaaaaaaaa

SEQ ID NO: 406 - DNA, 2604 bp, synthetic construct
  source 1..2604: mol_type = other DNA
agcataaaagtctcaacacaacatatacaaaacaaacgaatctcaagcaatcaagcattctacttctattgcagcaatttaaatcatttcttttaaagcaaaagcaattttctgaaaattttcaccatttacgaacgatagcgctgccaccatgggctggtcctgcatcatcctgttcctggtggccaccgccaccggcgtgcacgccctgtgggtgaccgtgtactacggcgtgcccgtgtggcgcgaggccaagaccaccctgttctgcgcctccgacgccaagtcctacgagaaggaggtgcacaacatctgggccacccacgcctgcgtgcccaccgaccccaacccccaggagctggtgctgaagaacgtgaccgagaacttcaacatgtggaagaacgacatggtggaccagatgcacgaggacatcatctccctgtgggaccagtccctgaagccctgcgtgaagctgacccccctgtgcgtgaccctgcactgctccacctacaacaacacccacaacatctccaaggagatcaagaactgctccttcaacgccaccaccgagctgcgcaacaagcgccgcaaggagtacgccctgttctaccgcctggacatcgtgcccctgaacaagaacggccgccagtaccgcctgatcaactgcaacacctccgtgatcacccaggtgtgccccaagctgaccttcgaccccatccccatccactactgcgcccccgccggctacgccatcctgaagtgcaacaacaagaccttcaacggcaccggcccctgcaacaacgtgtccaccgtgcagtgcacccacggcatcaagcccgtgctgtccacccagctgctgctgaacggctccctggccgaggaggagatcatcatccgctccgagaacctgaccgacaacgtgaagaccatcatcgtgcacctgaacgagtccgtggagatcaactgcacccgccccaacaacaacacccgcaagtccatccgcatcggccccggccagaccttctacgccaccggcgacatcatcggcgacatccgccaggcccactgcaacatctccgagatcaagtggaacaagaccctgcagcgcgtgtccgagaagctgcgcgagcacttcaacaagaccatcatcttcaaccagtcctccggcggcgacctggagatcaccacccactccttcaactgcggcggcgagttcttctactgcaacacctccgacctgttcttcaacaagaccttcaacgagacctactccaccggctccaactccaccaactccaacatcaccctgccctgccgcatcaagcagatcatcaacatgtggcaggaggtgggccgcgccatgtacgcctcccccatcgccggcgagatcacctgcaagtccaacatcaccggcctgctgctgacccgcgacggcggcggcaacaactccaccgaggagaccttccgccccggcggcggcaacatgcgcgacaactggcgctccgagctgtacaagtacaaggtggtggaggtgaagcccctgggcatcgcccccaccgagtgccgccgccgcgtggtgcagggcggcggcggctccggcggcggcggctccgccgtggtgggcctgggcgccgtgttcctgggcttcctgggcaccgccggctccaccatgggcgccgcctccatgaccctgaccgtgcaggcccgccagctgctgggctccgccggctccgccggctccggctccgccggctccggctccgccggctccggctccgccggctccaccgtgtggggcatcaagcagctgcaggcccgcgtgctggccatcgagcgctacctgaaggaccagcagctgctgggcatgtggggctgctccggcaagctgatctgctgcaccaacgtgtactggaactcctcctggtccaacaagacctacaacgagatctgggacaacatgacctggatgcagtgggaccgcgagatcgacaactacaccgacaccatctacaagctgctggaggtgtcccagaagcagcaggagtccaacgagaaggacctgctggccctggactcctggaacaacctgtggaactggttcgacatctccaagtggctgtggtacatcaagatcttcatcatgatcgtgggcggcctgatcggcctgcgcatcatcttcgccgtgctgtccctggtgaaccgcgtgcgccagggcatctcccccctgtccttccagaccctgacccccaacccccgcgagctggaccgcctgggcggcatcgaggaggagggcggcgagcaggaccgcgaccgctccatccgcctggtgtcctaataaactagtagtgactgactaggatctggttaccactaaaccagcctcaagaacacccgaatggagtctctaagctacataataccaacttacacttacaaaatgttgtcccccaaaatgtagccattcgtatctgctcctaataaaaagaaagtttcttcacattctaaaaaaaaaaaaaaaaaaaaaaaaaaaaaaaaaaaaaaaaaaaaaaaaaaaaaaaaaaaaaaaaaaaaaaaaaaaaaaaaaaaaaaaaaaaaaaaaaaaaa

SEQ ID NO: 407 - DNA, 2604 bp, synthetic construct
  source 1..2604: mol_type = other DNA
agcataaaagtctcaacacaacatatacaaaacaaacgaatctcaagcaatcaagcattctacttctattgcagcaatttaaatcatttcttttaaagcaaaagcaattttctgaaaattttcaccatttacgaacgatagcgctgccaccatgggctggtcctgcatcatcctgttcctggtggccaccgccaccggcgtgcacgccctgtgggtgaccgtgtactacggcgtgcccgtgtggcgcgaggccaagaccaccctgttctgcgcctccgacgccaagtcctacgagaaggaggtgcacaacatctgggccacccacgcctgcgtgcccaccgaccccaacccccaggagctggtgctgaagaacgtgaccgagaacttcaacatgtggaagaacgacatggtggaccagatgcacgaggacatcatctccctgtgggaccagtccctgaagccctgcgtgaagctgacccccctgtgcgtgaccctgcactgctccacctacaacaacacccacaacatctccaaggagatcaagaactgctccttcaacgccaccaccgagctgcgcaacaagcgccgcaaggagtacgccctgttctaccgcctggacatcgtgcccctgaacaagaacggccgccagtaccgcctgatcaactgcaacacctccgtgtgcacccaggtgtgccccaagctgaccttcgaccccatccccatccactactgcgcccccgccggctacgccatcctgaagtgcaacaacaagaccttcaacggcaccggcccctgcaacaacgtgtccaccgtgcagtgcacccacggcatcaagcccgtgctgtccacccagctgctgctgaacggctccctggccgaggaggagatcatcatccgctccgagaacctgaccgacaacgtgaagaccatcatcgtgcacctgaacgagtccgtggagatcaactgcacccgccccaacaacaacacccgcaagtccatccgcatcggccccggccagaccttctacgccaccggcgacatcatcggcgacatccgccaggcccactgcaacatctccgagatcaagtggaacaagaccctgcagcgcgtgtccgagaagctgcgcgagcacttcaacaagaccatcatcttcaaccagtcctccggcggcgacctggagatcaccacccactccttcaactgcggcggcgagttcttctactgcaacacctccgacctgttcttcaacaagaccttcaacgagacctactccaccggctccaactccaccaactccaacatcaccctgccctgccgcatcaagcagatcatcaacatgtggcaggaggtgggccgctgcatgtacgcctcccccatcgccggcgagatcacctgcaagtccaacatcaccggcctgctgctgacccgcgacggcggcggcaacaactccaccgaggagaccttccgccccggcggcggcaacatgcgcgacaactggcgctccgagctgtacaagtacaaggtggtggaggtgaagcccctgggcatcgcccccaccgagtgccgccgccgcgtggtgcagggcggcggcggctccggcggcggcggctccgccgtggtgggcctgggcgccgtgttcctgggcttcctgggcaccgccggctccaccatgggcgccgcctccatgaccctgaccgtgcaggcccgccagctgctgggctccgccggctccgccggctccggctccgccggctccggctccgccggctccggctccgccggctccaccgtgtggggcatcaagcagctgcaggcccgcgtgctggccatcgagcgctacctgaaggaccagcagctgctgggcatgtggggctgctccggcaagctgatctgctgcaccaacgtgtactggaactcctcctggtccaacaagacctacaacgagatctgggacaacatgacctggatgcagtgggaccgcgagatcgacaactacaccgacaccatctacaagctgctggaggtgtcccagaagcagcaggagtccaacgagaaggacctgctggccctggactcctggaacaacctgtggaactggttcgacatctccaagtggctgtggtacatcaagatcttcatcatgatcgtgggcggcctgatcggcctgcgcatcatcttcgccgtgctgtccctggtgaaccgcgtgcgccagggcatctcccccctgtccttccagaccctgacccccaacccccgcgagctggaccgcctgggcggcatcgaggaggagggcggcgagcaggaccgcgaccgctccatccgcctggtgtcctaataaactagtagtgactgactaggatctggttaccactaaaccagcctcaagaacacccgaatggagtctctaagctacataataccaacttacacttacaaaatgttgtcccccaaaatgtagccattcgtatctgctcctaataaaaagaaagtttcttcacattctaaaaaaaaaaaaaaaaaaaaaaaaaaaaaaaaaaaaaaaaaaaaaaaaaaaaaaaaaaaaaaaaaaaaaaaaaaaaaaaaaaaaaaaaaaaaaaaaaaaaa

SEQ ID NO: 408 - DNA, 2637 bp, synthetic construct
  source 1..2637: mol_type = other DNA
agcataaaagtctcaacacaacatatacaaaacaaacgaatctcaagcaatcaagcattctacttctattgcagcaatttaaatcatttcttttaaagcaaaagcaattttctgaaaattttcaccatttacgaacgatagcgctgccaccatggactccaagggctcctcccagaagggctcccgcctgctgctgctgctggtggtgtccaacctgctgctgccccagggcgtgctggccctgtgggtgaccgtgtactacggcgtgcccgtgtggcgcgaggccaagaccaccctgttctgcgcctccgacgccaagtcctacgagaaggaggtggccaacatctgggccacccacgcctgcgtgcccaccgaccccaacccccaggagctggtgctgaagaacgtgaccgagaacttcaacatgtggaagaacgacatggtggaccagatgcacgaggacatcatctccctgtgggaccagtccctgaagccctgcgtgaagctgacccccctgtgcgtgaccctgcactgctccacctacaacaacacccacaacatctccaaggagatcaagaactgctccttcaacgccaccaccgagctgcgcaacaagcgccgcaaggagtacgccctgttctaccgcctggacatcgtgcccctgaacaagaacggccgccagtaccgcctgatcaactgcaacacctccgtgtgcacccaggtgtgccccaagctgaccttcgaccccatccccatccactactgcgcccccgccggctacgccatcctgaagtgcaacaacaagaccttcaacggcaccggcccctgcaacaacgtgtccaccgtgcagtgcacccacggcatcaagcccgtgctgtccacccagctgctgctgaacggctccctggccgaggaggagatcatcatccgctccgagaacctgaccgacaacgtgaagaccatcatcgtgcacctgaacgagtccgtggagatcaactgcacccgccccaacaacaacacccgcaagtccatccgcatcggccccggccagtggttctacgccaccggcgacatcatcggcgacatccgccaggcccactgcaacatctccgagatcaagtggaacaagaccctgcagcgcgtgtccgagaagctgcgcgagcacttcaacaagaccatcatcttcaaccagtcctccggcggcgacctggagatcaccacccactccttcaactgcggcggcgagttcttctactgcaacacctccgacctgttcttcaacaagaccttcaacgagacctactccaccggctccaactccaccaactccaacatcaccctgccctgccgcatcaagcagatcatcaacatgtggcaggaggtgggccgctgcatgtacgcctcccccatcgccggcgagatcacctgcaagtccaacatcaccggcctgctgctgacccgcgacggcggcggcaacaactccaccgaggagaccttccgccccggcggcggcaacatgcgcgacaactggcgctccgagctgtacaagtacaaggtggtggaggtgaagcccctgggcatcgcccccaccgagtgccgccgccgcgtggtgcagggcggcggcggctccggcggcggcggctccgccgtggtgggcctgggcgccgtgttcctgggcttcctgggcaccgccggctccaccatgggcgccgcctccatgaccctgaccgtgcaggcccgccagctgctgggctccgccggctccgccggctccggctccgccggctccggctccgccggctccggctccgccggctccaccgtgtggggcatcaagcagctgcaggcccgcgtgctggccatcgagcgctacctgaaggaccagcagctgctgggcatgtggggctgctccggcaagctgatctgctgcaccaacgtgtactggaactcctcctggtccaacaagacctacaacgagatctgggacaacatgacctggatgcagtgggaccgcgagatcgacaactacaccgacaccatctacaagctgctggaggtgtcccagaagcagcaggagaagaacgagcaggacctgctggccctggactcctggaacaacctgtggaactggttcgacatctccaagtggctgtggtacatcaagatcttcatcatgatcgtgggcggcctgatcggcctgcgcatcatcttcgccgtgctgtccctggtgaaccgcgtgcgccagggcatctcccccctgtccttccagaccctgacccccaacccccgcgagctggaccgcctgggcggcatcgaggaggagggcggcgagcaggaccgcgaccgctccatccgcctggtgtcctaataaactagtagtgactgactaggatctggttaccactaaaccagcctcaagaacacccgaatggagtctctaagctacataataccaacttacacttacaaaatgttgtcccccaaaatgtagccattcgtatctgctcctaataaaaagaaagtttcttcacattctaaaaaaaaaaaaaaaaaaaaaaaaaaaaaaaaaaaaaaaaaaaaaaaaaaaaaaaaaaaaaaaaaaaaaaaaaaaaaaaaaaaaaaaaaaaaaaaaaaaaa

SEQ ID NO: 409 - DNA, 2604 bp, synthetic construct
  source 1..2604: mol_type = other DNA
agcataaaagtctcaacacaacatatacaaaacaaacgaatctcaagcaatcaagcattctacttctattgcagcaatttaaatcatttcttttaaagcaaaagcaattttctgaaaattttcaccatttacgaacgatagcgctgccaccatgggctggtcctgcatcatcctgttcctggtggccaccgccaccggcgtgcacgccctgtgggtgaccgtgtactacggcgtgcccgtgtggcgcgaggccaagaccaccctgttctgcgcctccgacgccaagtcctacgagaaggaggtggccaacatctgggccacccacgcctgcgtgcccaccgaccccaacccccaggagctggtgctgaagaacgtgaccgagaacttcaacatgtggaagaacgacatggtggaccagatgcacgaggacatcatctccctgtgggaccagtccctgaagccctgcgtgaagctgacccccctgtgcgtgaccctgcactgctccacctacaacaacacccacaacatctccaaggagatcaagaactgctccttcaacgccaccaccgagctgcgcaacaagcgccgcaaggagtacgccctgttctaccgcctggacatcgtgcccctgaacaagaacggccgccagtaccgcctgatcaactgcaacacctccgtgtgcacccaggtgtgccccaagctgaccttcgaccccatccccatccactactgcgcccccgccggctacgccatcctgaagtgcaacaacaagaccttcaacggcaccggcccctgcaacaacgtgtccaccgtgcagtgcacccacggcatcaagcccgtgctgtccacccagctgctgctgaacggctccctggccgaggaggagatcatcatccgctccgagaacctgaccgacaacgtgaagaccatcatcgtgcacctgaacgagtccgtggagatcaactgcacccgccccaacaacaacacccgcaagtccatccgcatcggccccggccagtggttctacgccaccggcgacatcatcggcgacatccgccaggcccactgcaacatctccgagatcaagtggaacaagaccctgcagcgcgtgtccgagaagctgcgcgagcacttcaacaagaccatcatcttcaaccagtcctccggcggcgacctggagatcaccacccactccttcaactgcggcggcgagttcttctactgcaacacctccgacctgttcttcaacaagaccttcaacgagacctactccaccggctccaactccaccaactccaacatcaccctgccctgccgcatcaagcagatcatcaacatgtggcaggaggtgggccgctgcatgtacgcctcccccatcgccggcgagatcacctgcaagtccaacatcaccggcctgctgctgacccgcgacggcggcggcaacaactccaccgaggagaccttccgccccggcggcggcaacatgcgcgacaactggcgctccgagctgtacaagtacaaggtggtggaggtgaagcccctgggcatcgcccccaccgagtgccgccgccgcgtggtgcagggcggcggcggctccggcggcggcggctccgccgtggtgggcctgggcgccgtgttcctgggcttcctgggcaccgccggctccaccatgggcgccgcctccatgaccctgaccgtgcaggcccgccagctgctgggctccgccggctccgccggctccggctccgccggctccggctccgccggctccggctccgccggctccaccgtgtggggcatcaagcagctgcaggcccgcgtgctggccatcgagcgctacctgaaggaccagcagctgctgggcatgtggggctgctccggcaagctgatctgctgcaccaacgtgtactggaactcctcctggtccaacaagacctacaacgagatctgggacaacatgacctggatgcagtgggaccgcgagatcgacaactacaccgacaccatctacaagctgctggaggtgtcccagaagcagcaggagaagaacgagcaggacctgctggccctggactcctggaacaacctgtggaactggttcgacatctccaagtggctgtggtacatcaagatcttcatcatgatcgtgggcggcctgatcggcctgcgcatcatcttcgccgtgctgtccctggtgaaccgcgtgcgccagggcatctcccccctgtccttccagaccctgacccccaacccccgcgagctggaccgcctgggcggcatcgaggaggagggcggcgagcaggaccgcgaccgctccatccgcctggtgtcctaataaactagtagtgactgactaggatctggttaccactaaaccagcctcaagaacacccgaatggagtctctaagctacataataccaacttacacttacaaaatgttgtcccccaaaatgtagccattcgtatctgctcctaataaaaagaaagtttcttcacattctaaaaaaaaaaaaaaaaaaaaaaaaaaaaaaaaaaaaaaaaaaaaaaaaaaaaaaaaaaaaaaaaaaaaaaaaaaaaaaaaaaaaaaaaaaaaaaaaaaaaa

SEQ ID NO: 410 - DNA, 2604 bp, synthetic construct
  source 1..2604: mol_type = other DNA
agcataaaagtctcaacacaacatatacaaaacaaacgaatctcaagcaatcaagcattctacttctattgcagcaatttaaatcatttcttttaaagcaaaagcaattttctgaaaattttcaccatttacgaacgatagcgctgccaccatgggctggtcctgcatcatcctgttcctggtggccaccgccaccggcgtgcacgccctgtgggtgaccgtgtactacggcgtgcccgtgtggcgcgaggccaagaccaccctgttctgcgcctccgacgccaagtcctacgagaaggaggtggccaacatctgggccacccacgcctgcgtgcccaccgaccccaacccccaggagctggtgctgaagaacgtgaccgagaacttcaacatgtggaagaacgacatggtggaccagatgcacgaggacatcatctccctgtgggaccagtccctgaagccctgcgtgaagctgacccccctgtgcgtgaccctgcactgctccacctacaacaacacccacaacatctccaaggagatcaagaactgctccttcaacgccaccaccgagctgcgcaacaagcgccgcaaggagtacgccctgttctaccgcctggacatcgtgcccctgaacaagaacggccgccagtaccgcctgatcaactgcaacacctccgtgtgcacccaggtgtgccccaagctgaccttcgaccccatccccatccactactgcgcccccgccggctacgccatcctgaagtgcaacaacaagaccttcaacggcaccggcccctgcaacaacgtgtccaccgtgcagtgcacccacggcatcaagcccgtgctgtccacccagctgctgctgaacggctccctggccgaggaggagatcatcatccgctccgagaacctgaccgacaacgtgaagaccatcatcgtgcacctgaacgagtccgtggagatcaactgcacccgccccaacaacatgacccgcaagtccatccgcatcggccccggccagtggttctacgccctgggcgacatcatcggcgacatccgccagccccactgcaacatctccgagatcaagtggaacaagaccctgcagcgcgtgtccgagaagctgcgcgagcacttcaacaagaccatcatcttcaaccagtcctccggcggcgacctggagatcaccacccactccttcaactgcggcggcgagttcttctactgcaacacctccgacctgttcttcaacaagaccttcaacgagacctactccaccggctccaactccaccaactccaacatcaccctgccctgccgcatcaagcagatcatcaacatgtggcaggaggtgggccgctgcatgtacgccccccccatcgccggcaacatcacctgcaagtccaacatcaccggcctgctgctgacccgcgacggcggcggcaacaactccaccgaggagaccttccgccccggcggcggcaacatgcgcgacaactggcgctccgagctgtacaagtacaaggtggtggaggtgaagcccctgggcatcgcccccaccgagtgccgccgccgcgtggtgcagggcggcggcggctccggcggcggcggctccgccgtggtgggcctgggcgccgtgttcctgggcttcctgggcaccgccggctccaccatgggcgccgcctccatgaccctgaccgtgcaggcccgccagctgctgggctccgccggctccgccggctccggctccgccggctccggctccgccggctccggctccgccggctccaccgtgtggggcttcaagcagctgcaggcccgcgtgctggccatcgagcgctacctggaggtgcagcagctgctgggcatgtggggctgctccggcaagctgatctgctgcaccaacgtgccctggaactcctcctggtccaacaagacctacaacgagatctgggacaacatgacctggatgcagtgggaccgcgagatcggcaactacaccgacaccatctacaagctgctggaggtgtcccagttccagcaggagaagaacgagcaggacctgctggccctggactcctggaacaacctgtggaactggttcgacatctccaagtggctgtggtacatcaagatcttcatcatgatcgtgggcggcctgatcggcctgcgcatcatcttcgccgtgctgtccctggtgaaccgcgtgcgccagggcatctcccccctgtccttccagaccctgacccccaacccccgcgagctggaccgcctgggcggcatcgaggaggagggcggcgagcaggaccgcgaccgctccatccgcctggtgtcctaataaactagtagtgactgactaggatctggttaccactaaaccagcctcaagaacacccgaatggagtctctaagctacataataccaacttacacttacaaaatgttgtcccccaaaatgtagccattcgtatctgctcctaataaaaagaaagtttcttcacattctaaaaaaaaaaaaaaaaaaaaaaaaaaaaaaaaaaaaaaaaaaaaaaaaaaaaaaaaaaaaaaaaaaaaaaaaaaaaaaaaaaaaaaaaaaaaaaaaaaaaa

SEQ ID NO: 411 - DNA, 2976 bp, synthetic construct
  source 1..2976: mol_type = other DNA
agcataaaagtctcaacacaacatatacaaaacaaacgaatctcaagcaatcaagcattctacttctattgcagcaatttaaatcatttcttttaaagcaaaagcaattttctgaaaattttcaccatttacgaacgatagcgctgccaccatggactccaagggctcctcccagaagggctcccgcctgctgctgctgctggtggtgtccaacctgctgctgccccagggcgtgctggccctgtgggtgaccgtgtactacggcgtgcccgtgtggcgcgaggccaagaccaccctgttctgcgcctccgacgccaagtcctacgagaaggaggtgcacaacatctgggccacccacgcctgcgtgcccaccgaccccaacccccaggagctggtgctgaagaacgtgaccgagaacttcaacatgtggaagaacgacatggtggaccagatgcacgaggacatcatctccctgtgggaccagtccctgaagccctgcgtgaagctgacccccctgtgcgtgaccctgcactgctccacctacaacaacacccacaacatctccaaggagatcaagaactgctccttcaacgccaccaccgagctgcgcaacaagcgccgcaaggagtacgccctgttctaccgcctggacatcgtgcccctgaacaagaacggccgccagtaccgcctgatcaactgcaacacctccgtgatcacccaggtgtgccccaagctgaccttcgaccccatccccatccactactgcgcccccgccggctacgccatcctgaagtgcaacaacaagaccttcaacggcaccggcccctgcaacaacgtgtccaccgtgcagtgcacccacggcatcaagcccgtgctgtccacccagctgctgctgaacggctccctggccgaggaggagatcatcatccgctccgagaacctgaccgacaacgtgaagaccatcatcgtgcacctgaacgagtccgtggagatcaactgcacccgccccaacaacaacacccgcaagtccatccgcatcggccccggccagaccttctacgccaccggcgacatcatcggcgacatccgccaggcccactgcaacatctccgagatcaagtggaacaagaccctgcagcgcgtgtccgagaagctgcgcgagcacttcaacaagaccatcatcttcaaccagtcctccggcggcgacctggagatcaccacccactccttcaactgcggcggcgagttcttctactgcaacacctccgacctgttcttcaacaagaccttcaacgagacctactccaccggctccaactccaccaactccaacatcaccctgccctgccgcatcaagcagatcatcaacatgtggcaggaggtgggccgcgccatgtacgcctcccccatcgccggcgagatcacctgcaagtccaacatcaccggcctgctgctgacccgcgacggcggcggcaacaactccaccgaggagaccttccgccccggcggcggcaacatgcgcgacaactggcgctccgagctgtacaagtacaaggtggtggaggtgaagcccctgggcatcgcccccaccgagtgccgccgccgcgtggtgcagggcggcggcggctccggcggcggcggctccgccgtggtgggcctgggcgccgtgttcctgggcttcctgggcaccgccggctccaccatgggcgccgcctccatgaccctgaccgtgcaggcccgccagctgctgggctccgccggctccgccggctccggctccgccggctccggctccgccggctccggctccgccggctccaccgtgtggggcatcaagcagctgcaggcccgcgtgctggccatcgagcgctacctgaaggaccagcagctgctgggcatgtggggctgctccggcaagctgatctgctgcaccaacgtgtactggaactcctcctggtccaacaagacctacaacgagatctgggacaacatgacctggatgcagtgggaccgcgagatcgacaactacaccgacaccatctacaagctgctggaggtgtcccagaagcagcaggagtccaacgagaaggacctgctggccctggactcctggaacaacctgtggaactggttcgacatctccaagtggctgtggtacatcaagatcttcatcatgatcgtgggcggcctgatcggcctgcgcatcatcttcgccgtgctgtccctggtgaaccgcgtgcgccagggcatctcccccctgtccttccagaccctgacccccaacccccgcgagctggaccgcctgggcggcatcgaggaggagggcggcgagcaggaccgcgaccgctccatccgcctggtgtccggcttcttctccctggcctggaacgacctgcgctccctgtgcctgttctgctaccaccgcctgcgcgacttcatcctgatcgccggccgcgccgtggagctgctgggccgctcctccctgcagggcctgcagcgcggctgggagatcctgaagtacctgggctccctggtgcagtactggggcctggagctgaagaagtccgccatcaacctgttcgacaccatcgccatcgccgtggccgagggcaccgaccgcatcatcgagttcctgcagcgcatcgtgcgcgccatcctgcacatcccccgccgcatccgccagggcttcgaggccgccctgcagtaataaactagtagtgactgactaggatctggttaccactaaaccagcctcaagaacacccgaatggagtctctaagctacataataccaacttacacttacaaaatgttgtcccccaaaatgtagccattcgtatctgctcctaataaaaagaaagtttcttcacattctaaaaaaaaaaaaaaaaaaaaaaaaaaaaaaaaaaaaaaaaaaaaaaaaaaaaaaaaaaaaaaaaaaaaaaaaaaaaaaaaaaaaaaaaaaaaaaaaaaaaa

SEQ ID NO: 412 - DNA, 2523 bp, synthetic construct
  source 1..2523: mol_type = other DNA
agcataaaagtctcaacacaacatatacaaaacaaacgaatctcaagcaatcaagcattctacttctattgcagcaatttaaatcatttcttttaaagcaaaagcaattttctgaaaattttcaccatttacgaacgatagcgctgccaccatggactccaagggctcctcccagaagggctcccgcctgctgctgctgctggtggtgtccaacctgctgctgccccagggcgtgctggccctgtgggtgaccgtgtactacggcgtgcccgtgtggcgcgaggccaagaccaccctgttctgcgcctccgacgccaagtcctacgagaaggaggtgcacaacatctgggccacccacgcctgcgtgcccaccgaccccaacccccaggagctggtgctgaagaacgtgaccgagaacttcaacatgtggaagaacgacatggtggaccagatgcacgaggacatcatctccctgtgggaccagtccctgaagccctgcgtgaagctgacccccctgtgcgtgaccctgcactgctccacctacaacaacacccacaacatctccaaggagatcaagaactgctccttcaacgccaccaccgagctgcgcaacaagcgccgcaaggagtacgccctgttctaccgcctggacatcgtgcccctgaacaagaacggccgccagtaccgcctgatcaactgcaacacctccgtgatcacccaggtgtgccccaagctgaccttcgaccccatccccatccactactgcgcccccgccggctacgccatcctgaagtgcaacaacaagaccttcaacggcaccggcccctgcaacaacgtgtccaccgtgcagtgcacccacggcatcaagcccgtgctgtccacccagctgctgctgaacggctccctggccgaggaggagatcatcatccgctccgagaacctgaccgacaacgtgaagaccatcatcgtgcacctgaacgagtccgtggagatcaactgcacccgccccaacaacaacacccgcaagtccatccgcatcggccccggccagaccttctacgccaccggcgacatcatcggcgacatccgccaggcccactgcaacatctccgagatcaagtggaacaagaccctgcagcgcgtgtccgagaagctgcgcgagcacttcaacaagaccatcatcttcaaccagtcctccggcggcgacctggagatcaccacccactccttcaactgcggcggcgagttcttctactgcaacacctccgacctgttcttcaacaagaccttcaacgagacctactccaccggctccaactccaccaactccaacatcaccctgccctgccgcatcaagcagatcatcaacatgtggcaggaggtgggccgcgccatgtacgcctcccccatcgccggcgagatcacctgcaagtccaacatcaccggcctgctgctgacccgcgacggcggcggcaacaactccaccgaggagaccttccgccccggcggcggcaacatgcgcgacaactggcgctccgagctgtacaagtacaaggtggtggaggtgaagcccctgggcatcgcccccaccgagtgccgccgccgcgtggtgcagggcggcggcggctccggcggcggcggctccgccgtggtgggcctgggcgccgtgttcctgggcttcctgggcaccgccggctccaccatgggcgccgcctccatgaccctgaccgtgcaggcccgccagctgctgggctccgccggctccgccggctccggctccgccggctccggctccgccggctccggctccgccggctccaccgtgtggggcatcaagcagctgcaggcccgcgtgctggccatcgagcgctacctgaaggaccagcagctgctgggcatgtggggctgctccggcaagctgatctgctgcaccaacgtgtactggaactcctcctggtccaacaagacctacaacgagatctgggacaacatgacctggatgcagtgggaccgcgagatcgacaactacaccgacaccatctacaagctgctggaggtgtcccagaagcagcaggagtccaacgagaaggacctgctggccctggactcctggaacaacctgtggaactggttcgacatctccaagtggctgtggtacatcaagatcttcatcatgatcgtgggcggcctgatcggcctgcgcatcatcttcgccgtgctgtccctggtgaaccgcgtgcgccagggcatctaataaactagtagtgactgactaggatctggttaccactaaaccagcctcaagaacacccgaatggagtctctaagctacataataccaacttacacttacaaaatgttgtcccccaaaatgtagccattcgtatctgctcctaataaaaagaaagtttcttcacattctaaaaaaaaaaaaaaaaaaaaaaaaaaaaaaaaaaaaaaaaaaaaaaaaaaaaaaaaaaaaaaaaaaaaaaaaaaaaaaaaaaaaaaaaaaaaaaaaaaaaa

SEQ ID NO: 413 - DNA, 2652 bp, synthetic construct
  source 1..2652: mol_type = other DNA
agcataaaagtctcaacacaacatatacaaaacaaacgaatctcaagcaatcaagcattctacttctattgcagcaatttaaatcatttcttttaaagcaaaagcaattttctgaaaattttcaccatttacgaacgatagcgctgccaccatggactccaagggctcctcccagaagggctcccgcctgctgctgctgctggtggtgtccaacctgctgctgccccagggcgtgctggccctgtgggtgaccgtgtactacggcgtgcccgtgtggcgcgaggccaagaccaccctgttctgcgcctccgacgccaagtcctacgagaaggaggtgcacaacatctgggccacccacgcctgcgtgcccaccgaccccaacccccaggagctggtgctgaagaacgtgaccgagaacttcaacatgtggaagaacgacatggtggaccagatgcacgaggacatcatctccctgtgggaccagtccctgaagccctgcgtgaagctgacccccctgtgcgtgaccctgcactgctccacctacaacaacacccacaacatctccaaggagatcaagaactgctccttcaacgccaccaccgagctgcgcaacaagcgccgcaaggagtacgccctgttctaccgcctggacatcgtgcccctgaacaagaacggccgccagtaccgcctgatcaactgcaacacctccgtgatcacccaggtgtgccccaagctgaccttcgaccccatccccatccactactgcgcccccgccggctacgccatcctgaagtgcaacaacaagaccttcaacggcaccggcccctgcaacaacgtgtccaccgtgcagtgcacccacggcatcaagcccgtgctgtccacccagctgctgctgaacggctccctggccgaggaggagatcatcatccgctccgagaacctgaccgacaacgtgaagaccatcatcgtgcacctgaacgagtccgtggagatcaactgcacccgccccaacaacaacacccgcaagtccatccgcatcggccccggccagaccttctacgccaccggcgacatcatcggcgacatccgccaggcccactgcaacatctccgagatcaagtggaacaagaccctgcagcgcgtgtccgagaagctgcgcgagcacttcaacaagaccatcatcttcaaccagtcctccggcggcgacctggagatcaccacccactccttcaactgcggcggcgagttcttctactgcaacacctccgacctgttcttcaacaagaccttcaacgagacctactccaccggctccaactccaccaactccaacatcaccctgccctgccgcatcaagcagatcatcaacatgtggcaggaggtgggccgcgccatgtacgcctcccccatcgccggcgagatcacctgcaagtccaacatcaccggcctgctgctgacccgcgacggcggcggcaacaactccaccgaggagaccttccgccccggcggcggcaacatgcgcgacaactggcgctccgagctgtacaagtacaaggtggtggaggtgaagcccctgggcatcgcccccaccgagtgccgccgccgcgtggtgcagggcggcggcggctccggcggcggcggctccgccgtggtgggcctgggcgccgtgttcctgggcttcctgggcaccgccggctccaccatgggcgccgcctccatgaccctgaccgtgcaggcccgccagctgctgggctccgccggctccgccggctccggctccgccggctccggctccgccggctccggctccgccggctccaccgtgtggggcatcaagcagctgcaggcccgcgtgctggccatcgagcgctacctgaaggaccagcagctgctgggcatgtggggctgctccggcaagctgatctgctgcaccaacgtgtactggaactcctcctggtccaacaagacctacaacgagatctgggacaacatgacctggatgcagtgggaccgcgagatcgacaactacaccgacaccatctacaagctgctggaggtgtcccagaagcagcaggagtccaacgagaaggacctgctggccctggactcctggaacaacctgtggaactggttcgacatctccaagtggctgtggtacatcaagatcttcatcatgatcgtgggcggcctgatcggcctgcgcatcatcttcgccgtgctgtccctggtgaaccgcgtgcgccagggcatctcccccctgtccttccagaccctgacccccaacccccgcgagctggaccgcctgggcggcatcgaggaggagggcggcgagcaggaccgcgaccgctccatccgcctggtgtccggcttcttctccctgtaataaactagtagtgactgactaggatctggttaccactaaaccagcctcaagaacacccgaatggagtctctaagctacataataccaacttacacttacaaaatgttgtcccccaaaatgtagccattcgtatctgctcctaataaaaagaaagtttcttcacattctaaaaaaaaaaaaaaaaaaaaaaaaaaaaaaaaaaaaaaaaaaaaaaaaaaaaaaaaaaaaaaaaaaaaaaaaaaaaaaaaaaaaaaaaaaaaaaaaaaaaa

SEQ ID NO: 414 - DNA, 2637 bp, synthetic construct
  source 1..2637: mol_type = other DNA
agcataaaagtctcaacacaacatatacaaaacaaacgaatctcaagcaatcaagcattctacttctattgcagcaatttaaatcatttcttttaaagcaaaagcaattttctgaaaattttcaccatttacgaacgatagcgctgccaccatggactccaagggctcctcccagaagggctcccgcctgctgctgctgctggtggtgtccaacctgctgctgccccagggcgtgctggccctgtgggtgaccgtgtactacggcgtgcccgtgtggcgcgaggccaagaccaccctgttctgcgcctccgacgccaagtcctacgagaaggaggtgcacaacatctgggccacccacgcctgcgtgcccaccgaccccaacccccaggagctggtgctgaagaacgtgaccgagaacttcaacatgtggaagaacgacatggtggaccagatgcacgaggacatcatctccctgtgggaccagtccctgaagccctgcgtgaagctgacccccctgtgcgtgaccctgcactgctccacctacaacaacacccacaacatctccaaggagatcaagaactgctccttcaacgccaccaccgagctgcgcaacaagcgccgcaaggagtacgccctgttctaccgcctggacatcgtgcccctgaacaagaacggccgccagtaccgcctgatcaactgcaacacctccgtgatcacccaggtgtgccccaagctgaccttcgaccccatccccatccactactgcgcccccgccggctacgccatcctgaagtgcaacaacaagaccttcaacggcaccggcccctgcaacaacgtgtccaccgtgcagtgcacccacggcatcaagcccgtgctgtccacccagctgctgctgaacggctccctggccgaggaggagatcatcatccgctccgagaacctgaccgacaacgtgaagaccatcatcgtgcacctgaacgagtccgtggagatcaactgcacccgccccaacaacaacacccgcaagtccatccgcatcggccccggccagaccttctacgccaccggcgacatcatcggcgacatccgccaggcccactgcaacatctccgagatcaagtggaacaagaccctgcagcgcgtgtccgagaagctgcgcgagcacttcaacaagaccatcatcttcaaccagtcctccggcggcgacctggagatcaccacccactccttcaactgcggcggcgagttcttctactgcaacacctccgacctgttcttcaacaagaccttcaacgagacctactccaccggctccaactccaccaactccaacatcaccctgccctgccgcatcaagcagatcatcaacatgtggcaggaggtgggccgcgccatgtacgcctcccccatcgccggcgagatcacctgcaagtccaacatcaccggcctgctgctgacccgcgacggcggcggcaacaactccaccgaggagaccttccgccccggcggcggcaacatgcgcgacaactggcgctccgagctgtacaagtacaaggtggtggaggtgaagcccctgggcatcgcccccaccgagtgccgccgccgcgtggtgcagggcggcggcggctccggcggcggcggctccgccgtggtgggcctgggcgccgtgttcctgggcttcctgggcaccgccggctccaccatgggcgccgcctccatgaccctgaccgtgcaggcccgccagctgctgggctccgccggctccgccggctccggctccgccggctccggctccgccggctccggctccgccggctccaccgtgtggggcatcaagcagctgcaggcccgcgtgctggccatcgagcgctacctgaaggaccagcagctgctgggcatgtggggctgctccggcaagctgatctgctgcaccaacgtgtactggaactcctcctggtccaacaagacctacaacgagatctgggacaacatgacctggatgcagtgggaccgcgagatcgacaactacaccgacaccatctacaagctgctggaggtgtcccagaagcagcaggagtccaacgagaaggacctgctggccctggactcctggaacaacctgtggaactggttcgacatctccaagtggctgtggtacatcaagatcttcatcatgatcgtgggcggcctgatcggcctgcgcatcatcttcgccgtgctgtccctggtgaaccgcgtgcgccagggcatctcccccctgtccttccagaccctgacccccaacccccgcgagctggaccgcctgggcggcatcgaggaggagggcggcgagcaggaccgcgaccgctccatccgcctggtgtcctaataaactagtagtgactgactaggatctggttaccactaaaccagcctcaagaacacccgaatggagtctctaagctacataataccaacttacacttacaaaatgttgtcccccaaaatgtagccattcgtatctgctcctaataaaaagaaagtttcttcacattctaaaaaaaaaaaaaaaaaaaaaaaaaaaaaaaaaaaaaaaaaaaaaaaaaaaaaaaaaaaaaaaaaaaaaaaaaaaaaaaaaaaaaaaaaaaaaaaaaaaaa

SEQ ID NO: 415 - DNA, 2976 bp, synthetic construct
  source 1..2976: mol_type = other DNA
agcataaaagtctcaacacaacatatacaaaacaaacgaatctcaagcaatcaagcattctacttctattgcagcaatttaaatcatttcttttaaagcaaaagcaattttctgaaaattttcaccatttacgaacgatagcgctgccaccatggactccaagggctcctcccagaagggctcccgcctgctgctgctgctggtggtgtccaacctgctgctgccccagggcgtgctggccctgtgggtgaccgtgtactacggcgtgcccgtgtggcgcgaggccaagaccaccctgttctgcgcctccgacgccaagtcctacgagaaggaggtgcacaacatctgggccacccacgcctgcgtgcccaccgaccccaacccccaggagctggtgctgaagaacgtgaccgagaacttcaacatgtggaagaacgacatggtggaccagatgcacgaggacatcatctccctgtgggaccagtccctgaagccctgcgtgaagctgacccccctgtgcgtgaccctgcactgctccacctacaacaacacccacaacatctccaaggagatcaagaactgctccttcaacgccaccaccgagctgcgcaacaagcgccgcaaggagtacgccctgttctaccgcctggacatcgtgcccctgaacaagaacggccgccagtaccgcctgatcaactgcaacacctccgtgtgcacccaggtgtgccccaagctgaccttcgaccccatccccatccactactgcgcccccgccggctacgccatcctgaagtgcaacaacaagaccttcaacggcaccggcccctgcaacaacgtgtccaccgtgcagtgcacccacggcatcaagcccgtgctgtccacccagctgctgctgaacggctccctggccgaggaggagatcatcatccgctccgagaacctgaccgacaacgtgaagaccatcatcgtgcacctgaacgagtccgtggagatcaactgcacccgccccaacaacaacacccgcaagtccatccgcatcggccccggccagaccttctacgccaccggcgacatcatcggcgacatccgccaggcccactgcaacatctccgagatcaagtggaacaagaccctgcagcgcgtgtccgagaagctgcgcgagcacttcaacaagaccatcatcttcaaccagtcctccggcggcgacctggagatcaccacccactccttcaactgcggcggcgagttcttctactgcaacacctccgacctgttcttcaacaagaccttcaacgagacctactccaccggctccaactccaccaactccaacatcaccctgccctgccgcatcaagcagatcatcaacatgtggcaggaggtgggccgctgcatgtacgcctcccccatcgccggcgagatcacctgcaagtccaacatcaccggcctgctgctgacccgcgacggcggcggcaacaactccaccgaggagaccttccgccccggcggcggcaacatgcgcgacaactggcgctccgagctgtacaagtacaaggtggtggaggtgaagcccctgggcatcgcccccaccgagtgccgccgccgcgtggtgcagggcggcggcggctccggcggcggcggctccgccgtggtgggcctgggcgccgtgttcctgggcttcctgggcaccgccggctccaccatgggcgccgcctccatgaccctgaccgtgcaggcccgccagctgctgggctccgccggctccgccggctccggctccgccggctccggctccgccggctccggctccgccggctccaccgtgtggggcatcaagcagctgcaggcccgcgtgctggccatcgagcgctacctgaaggaccagcagctgctgggcatgtggggctgctccggcaagctgatctgctgcaccaacgtgtactggaactcctcctggtccaacaagacctacaacgagatctgggacaacatgacctggatgcagtgggaccgcgagatcgacaactacaccgacaccatctacaagctgctggaggtgtcccagaagcagcaggagtccaacgagaaggacctgctggccctggactcctggaacaacctgtggaactggttcgacatctccaagtggctgtggtacatcaagatcttcatcatgatcgtgggcggcctgatcggcctgcgcatcatcttcgccgtgctgtccctggtgaaccgcgtgcgccagggcatctcccccctgtccttccagaccctgacccccaacccccgcgagctggaccgcctgggcggcatcgaggaggagggcggcgagcaggaccgcgaccgctccatccgcctggtgtccggcttcttctccctggcctggaacgacctgcgctccctgtgcctgttctgctaccaccgcctgcgcgacttcatcctgatcgccggccgcgccgtggagctgctgggccgctcctccctgcagggcctgcagcgcggctgggagatcctgaagtacctgggctccctggtgcagtactggggcctggagctgaagaagtccgccatcaacctgttcgacaccatcgccatcgccgtggccgagggcaccgaccgcatcatcgagttcctgcagcgcatcgtgcgcgccatcctgcacatcccccgccgcatccgccagggcttcgaggccgccgccgcctaataaactagtagtgactgactaggatctggttaccactaaaccagcctcaagaacacccgaatggagtctctaagctacataataccaacttacacttacaaaatgttgtcccccaaaatgtagccattcgtatctgctcctaataaaaagaaagtttcttcacattctaaaaaaaaaaaaaaaaaaaaaaaaaaaaaaaaaaaaaaaaaaaaaaaaaaaaaaaaaaaaaaaaaaaaaaaaaaaaaaaaaaaaaaaaaaaaaaaaaaaaa

SEQ ID NO: 416 - DNA, 2976 bp, synthetic construct
  source 1..2976: mol_type = other DNA
agcataaaagtctcaacacaacatatacaaaacaaacgaatctcaagcaatcaagcattctacttctattgcagcaatttaaatcatttcttttaaagcaaaagcaattttctgaaaattttcaccatttacgaacgatagcgctgccaccatggactccaagggctcctcccagaagggctcccgcctgctgctgctgctggtggtgtccaacctgctgctgccccagggcgtgctggccctgtgggtgaccgtgtactacggcgtgcccgtgtggcgcgaggccaagaccaccctgttctgcgcctccgacgccaagtcctacgagaaggaggtgcacaacatctgggccacccacgcctgcgtgcccaccgaccccaacccccaggagctggtgctgaagaacgtgaccgagaacttcaacatgtggaagaacgacatggtggaccagatgcacgaggacatcatctccctgtgggaccagtccctgaagccctgcgtgaagctgacccccctgtgcgtgaccctgcactgctccacctacaacaacacccacaacatctccaaggagatcaagaactgctccttcaacgccaccaccgagctgcgcaacaagcgccgcaaggagtacgccctgttctaccgcctggacatcgtgcccctgaacaagaacggccgccagtaccgcctgatcaactgcaacacctccgtgtgcacccaggtgtgccccaagctgaccttcgaccccatccccatccactactgcgcccccgccggctacgccatcctgaagtgcaacaacaagaccttcaacggcaccggcccctgcaacaacgtgtccaccgtgcagtgcacccacggcatcaagcccgtgctgtccacccagctgctgctgaacggctccctggccgaggaggagatcatcatccgctccgagaacctgaccgacaacgtgaagaccatcatcgtgcacctgaacgagtccgtggagatcaactgcacccgccccaacaacaacatgcgcaagtccatccgcatcggccccggccagaccttctacgccctgggcgacatcatcggcgacatccgccagccccactgcaacatctccgagatcaagtggaacaagaccctgcagcgcgtgtccgagaagctgcgcgagcacttcaacaagaccatcatcttcaaccagtcctccggcggcgacctggagatcaccacccactccttcaactgcggcggcgagttcttctactgcaacacctccgacctgttcttcaacaagaccttcaacgagacctactccaccggctccaactccaccaactccaacatcaccctgccctgccgcatcaagcagatcatcaacatgtggcaggaggtgggccgctgcatgtacgccccccccatcgccggcaacatcacctgcaagtccaacatcaccggcctgctgctgacccgcgacggcggcggcaacaactccaccgaggagaccttccgccccggcggcggcaacatgcgcgacaactggcgctccgagctgtacaagtacaaggtggtggaggtgaagcccctgggcatcgcccccaccgagtgccgccgccgcgtggtgcagggcggcggcggctccggcggcggcggctccgccgtggtgggcctgggcgccgtgttcctgggcttcctgggcaccgccggctccaccatgggcgccgcctccatgaccctgaccgtgcaggcccgccagctgctgggctccgccggctccgccggctccggctccgccggctccggctccgccggctccggctccgccggctccaccgtgtggggcttcaagcagctgcaggcccgcgtgctggccatcgagcgctacctggaggtgcagcagctgctgggcatgtggggctgctccggcaagctgatctgctgcaccaacgtgccctggaactcctcctggtccaacaagacctacaacgagatctgggacaacatgacctggatgcagtgggaccgcgagatcggcaactacaccgacaccatctacaagctgctggaggtgtcccagttccagcaggagatcaacgagaaggacctgctggccctggactcctggaacaacctgtggaactggttcgacatctccaagtggctgtggtacatcaagatcttcatcatgatcgtgggcggcctgatcggcctgcgcatcatcttcgccgtgctgtccctggtgaaccgcgtgcgccagggcatctcccccctgtccttccagaccctgacccccaacccccgcgagctggaccgcctgggcggcatcgaggaggagggcggcgagcaggaccgcgaccgctccatccgcctggtgtccggcttcttctccctggcctggaacgacctgcgctccctgtgcctgttctgctaccaccgcctgcgcgacttcatcctgatcgccggccgcgccgtggagctgctgggccgctcctccctgcagggcctgcagcgcggctgggagatcctgaagtacctgggctccctggtgcagtactggggcctggagctgaagaagtccgccatcaacctgttcgacaccatcgccatcgccgtggccgagggcaccgaccgcatcatcgagttcctgcagcgcatcgtgcgcgccatcctgcacatcccccgccgcatccgccagggcttcgaggccgccgccgcctaataaactagtagtgactgactaggatctggttaccactaaaccagcctcaagaacacccgaatggagtctctaagctacataataccaacttacacttacaaaatgttgtcccccaaaatgtagccattcgtatctgctcctaataaaaagaaagtttcttcacattctaaaaaaaaaaaaaaaaaaaaaaaaaaaaaaaaaaaaaaaaaaaaaaaaaaaaaaaaaaaaaaaaaaaaaaaaaaaaaaaaaaaaaaaaaaaaaaaaaaaaa

SEQ ID NO: 417 - DNA, 2976 bp, synthetic construct
  source 1..2976: mol_type = other DNA
agcataaaagtctcaacacaacatatacaaaacaaacgaatctcaagcaatcaagcattctacttctattgcagcaatttaaatcatttcttttaaagcaaaagcaattttctgaaaattttcaccatttacgaacgatagcgctgccaccatggactccaagggctcctcccagaagggctcccgcctgctgctgctgctggtggtgtccaacctgctgctgccccagggcgtgctggccctgtgggtgaccgtgtactacggcgtgcccgtgtggcgcgaggccaagaccaccctgttctgcgcctccgacgccaagtcctacgagaaggaggtggccaacatctgggccacccacgcctgcgtgcccaccgaccccaacccccaggagctggtgctgaagaacgtgaccgagaacttcaacatgtggaagaacgacatggtggaccagatgcacgaggacatcatctccctgtgggaccagtccctgaagccctgcgtgaagctgacccccctgtgcgtgaccctgcactgctccacctacaacaacacccacaacatctccaaggagatcaagaactgctccttcaacgccaccaccgagctgcgcaacaagcgccgcaaggagtacgccctgttctaccgcctggacatcgtgcccctgaacaagaacggccgccagtaccgcctgatcaactgcaacacctccgtgtgcacccaggtgtgccccaagctgaccttcgaccccatccccatccactactgcgcccccgccggctacgccatcctgaagtgcaacaacaagaccttcaacggcaccggcccctgcaacaacgtgtccaccgtgcagtgcacccacggcatcaagcccgtgctgtccacccagctgctgctgaacggctccctggccgaggaggagatcatcatccgctccgagaacctgaccgacaacgtgaagaccatcatcgtgcacctgaacgagtccgtggagatcaactgcacccgccccaacaacaacacccgcaagtccatccgcatcggccccggccagtggttctacgccaccggcgacatcatcggcgacatccgccaggcccactgcaacatctccgagatcaagtggaacaagaccctgcagcgcgtgtccgagaagctgcgcgagcacttcaacaagaccatcatcttcaaccagtcctccggcggcgacctggagatcaccacccactccttcaactgcggcggcgagttcttctactgcaacacctccgacctgttcttcaacaagaccttcaacgagacctactccaccggctccaactccaccaactccaacatcaccctgccctgccgcatcaagcagatcatcaacatgtggcaggaggtgggccgctgcatgtacgcctcccccatcgccggcgagatcacctgcaagtccaacatcaccggcctgctgctgacccgcgacggcggcggcaacaactccaccgaggagaccttccgccccggcggcggcaacatgcgcgacaactggcgctccgagctgtacaagtacaaggtggtggaggtgaagcccctgggcatcgcccccaccgagtgccgccgccgcgtggtgcagggcggcggcggctccggcggcggcggctccgccgtggtgggcctgggcgccgtgttcctgggcttcctgggcaccgccggctccaccatgggcgccgcctccatgaccctgaccgtgcaggcccgccagctgctgggctccgccggctccgccggctccggctccgccggctccggctccgccggctccggctccgccggctccaccgtgtggggcatcaagcagctgcaggcccgcgtgctggccatcgagcgctacctgaaggaccagcagctgctgggcatgtggggctgctccggcaagctgatctgctgcaccaacgtgtactggaactcctcctggtccaacaagacctacaacgagatctgggacaacatgacctggatgcagtgggaccgcgagatcgacaactacaccgacaccatctacaagctgctggaggtgtcccagaagcagcaggagaagaacgagcaggacctgctggccctggactcctggaacaacctgtggaactggttcgacatctccaagtggctgtggtacatcaagatcttcatcatgatcgtgggcggcctgatcggcctgcgcatcatcttcgccgtgctgtccctggtgaaccgcgtgcgccagggcatctcccccctgtccttccagaccctgacccccaacccccgcgagctggaccgcctgggcggcatcgaggaggagggcggcgagcaggaccgcgaccgctccatccgcctggtgtccggcttcttctccctggcctggaacgacctgcgctccctgtgcctgttctgctaccaccgcctgcgcgacttcatcctgatcgccggccgcgccgtggagctgctgggccgctcctccctgcagggcctgcagcgcggctgggagatcctgaagtacctgggctccctggtgcagtactggggcctggagctgaagaagtccgccatcaacctgttcgacaccatcgccatcgccgtggccgagggcaccgaccgcatcatcgagttcctgcagcgcatcgtgcgcgccatcctgcacatcccccgccgcatccgccagggcttcgaggccgccgccgcctaataaactagtagtgactgactaggatctggttaccactaaaccagcctcaagaacacccgaatggagtctctaagctacataataccaacttacacttacaaaatgttgtcccccaaaatgtagccattcgtatctgctcctaataaaaagaaagtttcttcacattctaaaaaaaaaaaaaaaaaaaaaaaaaaaaaaaaaaaaaaaaaaaaaaaaaaaaaaaaaaaaaaaaaaaaaaaaaaaaaaaaaaaaaaaaaaaaaaaaaaaaa

SEQ ID NO: 418 - DNA, 2976 bp, synthetic construct
  source 1..2976: mol_type = other DNA
agcataaaagtctcaacacaacatatacaaaacaaacgaatctcaagcaatcaagcattctacttctattgcagcaatttaaatcatttcttttaaagcaaaagcaattttctgaaaattttcaccatttacgaacgatagcgctgccaccatggactccaagggctcctcccagaagggctcccgcctgctgctgctgctggtggtgtccaacctgctgctgccccagggcgtgctggccctgtgggtgaccgtgtactacggcgtgcccgtgtggcgcgaggccaagaccaccctgttctgcgcctccgacgccaagtcctacgagaaggaggtggccaacatctgggccacccacgcctgcgtgcccaccgaccccaacccccaggagctggtgctgaagaacgtgaccgagaacttcaacatgtggaagaacgacatggtggaccagatgcacgaggacatcatctccctgtgggaccagtccctgaagccctgcgtgaagctgacccccctgtgcgtgaccctgcactgctccacctacaacaacacccacaacatctccaaggagatcaagaactgctccttcaacgccaccaccgagctgcgcaacaagcgccgcaaggagtacgccctgttctaccgcctggacatcgtgcccctgaacaagaacggccgccagtaccgcctgatcaactgcaacacctccgtgtgcacccaggtgtgccccaagctgaccttcgaccccatccccatccactactgcgcccccgccggctacgccatcctgaagtgcaacaacaagaccttcaacggcaccggcccctgcaacaacgtgtccaccgtgcagtgcacccacggcatcaagcccgtgctgtccacccagctgctgctgaacggctccctggccgaggaggagatcatcatccgctccgagaacctgaccgacaacgtgaagaccatcatcgtgcacctgaacgagtccgtggagatcaactgcacccgccccaacaacatgacccgcaagtccatccgcatcggccccggccagtggttctacgccctgggcgacatcatcggcgacatccgccagccccactgcaacatctccgagatcaagtggaacaagaccctgcagcgcgtgtccgagaagctgcgcgagcacttcaacaagaccatcatcttcaaccagtcctccggcggcgacctggagatcaccacccactccttcaactgcggcggcgagttcttctactgcaacacctccgacctgttcttcaacaagaccttcaacgagacctactccaccggctccaactccaccaactccaacatcaccctgccctgccgcatcaagcagatcatcaacatgtggcaggaggtgggccgctgcatgtacgccccccccatcgccggcaacatcacctgcaagtccaacatcaccggcctgctgctgacccgcgacggcggcggcaacaactccaccgaggagaccttccgccccggcggcggcaacatgcgcgacaactggcgctccgagctgtacaagtacaaggtggtggaggtgaagcccctgggcatcgcccccaccgagtgccgccgccgcgtggtgcagggcggcggcggctccggcggcggcggctccgccgtggtgggcctgggcgccgtgttcctgggcttcctgggcaccgccggctccaccatgggcgccgcctccatgaccctgaccgtgcaggcccgccagctgctgggctccgccggctccgccggctccggctccgccggctccggctccgccggctccggctccgccggctccaccgtgtggggcttcaagcagctgcaggcccgcgtgctggccatcgagcgctacctggaggtgcagcagctgctgggcatgtggggctgctccggcaagctgatctgctgcaccaacgtgccctggaactcctcctggtccaacaagacctacaacgagatctgggacaacatgacctggatgcagtgggaccgcgagatcggcaactacaccgacaccatctacaagctgctggaggtgtcccagttccagcaggagaagaacgagcaggacctgctggccctggactcctggaacaacctgtggaactggttcgacatctccaagtggctgtggtacatcaagatcttcatcatgatcgtgggcggcctgatcggcctgcgcatcatcttcgccgtgctgtccctggtgaaccgcgtgcgccagggcatctcccccctgtccttccagaccctgacccccaacccccgcgagctggaccgcctgggcggcatcgaggaggagggcggcgagcaggaccgcgaccgctccatccgcctggtgtccggcttcttctccctggcctggaacgacctgcgctccctgtgcctgttctgctaccaccgcctgcgcgacttcatcctgatcgccggccgcgccgtggagctgctgggccgctcctccctgcagggcctgcagcgcggctgggagatcctgaagtacctgggctccctggtgcagtactggggcctggagctgaagaagtccgccatcaacctgttcgacaccatcgccatcgccgtggccgagggcaccgaccgcatcatcgagttcctgcagcgcatcgtgcgcgccatcctgcacatcccccgccgcatccgccagggcttcgaggccgccgccgcctaataaactagtagtgactgactaggatctggttaccactaaaccagcctcaagaacacccgaatggagtctctaagctacataataccaacttacacttacaaaatgttgtcccccaaaatgtagccattcgtatctgctcctaataaaaagaaagtttcttcacattctaaaaaaaaaaaaaaaaaaaaaaaaaaaaaaaaaaaaaaaaaaaaaaaaaaaaaaaaaaaaaaaaaaaaaaaaaaaaaaaaaaaaaaaaaaaaaaaaaaaaa

SEQ ID NO: 419 - DNA, 2523 bp, synthetic construct
  source 1..2523: mol_type = other DNA
agcataaaagtctcaacacaacatatacaaaacaaacgaatctcaagcaatcaagcattctacttctattgcagcaatttaaatcatttcttttaaagcaaaagcaattttctgaaaattttcaccatttacgaacgatagcgctgccaccatggactccaagggctcctcccagaagggctcccgcctgctgctgctgctggtggtgtccaacctgctgctgccccagggcgtgctggccctgtgggtgaccgtgtactacggcgtgcccgtgtggcgcgaggccaagaccaccctgttctgcgcctccgacgccaagtcctacgagaaggaggtgcacaacatctgggccacccacgcctgcgtgcccaccgaccccaacccccaggagctggtgctgaagaacgtgaccgagaacttcaacatgtggaagaacgacatggtggaccagatgcacgaggacatcatctccctgtgggaccagtccctgaagccctgcgtgaagctgacccccctgtgcgtgaccctgcactgctccacctacaacaacacccacaacatctccaaggagatcaagaactgctccttcaacgccaccaccgagctgcgcaacaagcgccgcaaggagtacgccctgttctaccgcctggacatcgtgcccctgaacaagaacggccgccagtaccgcctgatcaactgcaacacctccgtgtgcacccaggtgtgccccaagctgaccttcgaccccatccccatccactactgcgcccccgccggctacgccatcctgaagtgcaacaacaagaccttcaacggcaccggcccctgcaacaacgtgtccaccgtgcagtgcacccacggcatcaagcccgtgctgtccacccagctgctgctgaacggctccctggccgaggaggagatcatcatccgctccgagaacctgaccgacaacgtgaagaccatcatcgtgcacctgaacgagtccgtggagatcaactgcacccgccccaacaacaacacccgcaagtccatccgcatcggccccggccagaccttctacgccaccggcgacatcatcggcgacatccgccaggcccactgcaacatctccgagatcaagtggaacaagaccctgcagcgcgtgtccgagaagctgcgcgagcacttcaacaagaccatcatcttcaaccagtcctccggcggcgacctggagatcaccacccactccttcaactgcggcggcgagttcttctactgcaacacctccgacctgttcttcaacaagaccttcaacgagacctactccaccggctccaactccaccaactccaacatcaccctgccctgccgcatcaagcagatcatcaacatgtggcaggaggtgggccgctgcatgtacgcctcccccatcgccggcgagatcacctgcaagtccaacatcaccggcctgctgctgacccgcgacggcggcggcaacaactccaccgaggagaccttccgccccggcggcggcaacatgcgcgacaactggcgctccgagctgtacaagtacaaggtggtggaggtgaagcccctgggcatcgcccccaccgagtgccgccgccgcgtggtgcagggcggcggcggctccggcggcggcggctccgccgtggtgggcctgggcgccgtgttcctgggcttcctgggcaccgccggctccaccatgggcgccgcctccatgaccctgaccgtgcaggcccgccagctgctgggctccgccggctccgccggctccggctccgccggctccggctccgccggctccggctccgccggctccaccgtgtggggcatcaagcagctgcaggcccgcgtgctggccatcgagcgctacctgaaggaccagcagctgctgggcatgtggggctgctccggcaagctgatctgctgcaccaacgtgtactggaactcctcctggtccaacaagacctacaacgagatctgggacaacatgacctggatgcagtgggaccgcgagatcgacaactacaccgacaccatctacaagctgctggaggtgtcccagaagcagcaggagtccaacgagaaggacctgctggccctggactcctggaacaacctgtggaactggttcgacatctccaagtggctgtggtacatcaagatcttcatcatgatcgtgggcggcctgatcggcctgcgcatcatcttcgccgtgctgtccctggtgaaccgcgtgcgccagggcatctaataaactagtagtgactgactaggatctggttaccactaaaccagcctcaagaacacccgaatggagtctctaagctacataataccaacttacacttacaaaatgttgtcccccaaaatgtagccattcgtatctgctcctaataaaaagaaagtttcttcacattctaaaaaaaaaaaaaaaaaaaaaaaaaaaaaaaaaaaaaaaaaaaaaaaaaaaaaaaaaaaaaaaaaaaaaaaaaaaaaaaaaaaaaaaaaaaaaaaaaaaaa

SEQ ID NO: 420 - DNA, 2523 bp, synthetic construct
  source 1..2523: mol_type = other DNA
agcataaaagtctcaacacaacatatacaaaacaaacgaatctcaagcaatcaagcattctacttctattgcagcaatttaaatcatttcttttaaagcaaaagcaattttctgaaaattttcaccatttacgaacgatagcgctgccaccatggactccaagggctcctcccagaagggctcccgcctgctgctgctgctggtggtgtccaacctgctgctgccccagggcgtgctggccctgtgggtgaccgtgtactacggcgtgcccgtgtggcgcgaggccaagaccaccctgttctgcgcctccgacgccaagtcctacgagaaggaggtgcacaacatctgggccacccacgcctgcgtgcccaccgaccccaacccccaggagctggtgctgaagaacgtgaccgagaacttcaacatgtggaagaacgacatggtggaccagatgcacgaggacatcatctccctgtgggaccagtccctgaagccctgcgtgaagctgacccccctgtgcgtgaccctgcactgctccacctacaacaacacccacaacatctccaaggagatcaagaactgctccttcaacgccaccaccgagctgcgcaacaagcgccgcaaggagtacgccctgttctaccgcctggacatcgtgcccctgaacaagaacggccgccagtaccgcctgatcaactgcaacacctccgtgtgcacccaggtgtgccccaagctgaccttcgaccccatccccatccactactgcgcccccgccggctacgccatcctgaagtgcaacaacaagaccttcaacggcaccggcccctgcaacaacgtgtccaccgtgcagtgcacccacggcatcaagcccgtgctgtccacccagctgctgctgaacggctccctggccgaggaggagatcatcatccgctccgagaacctgaccgacaacgtgaagaccatcatcgtgcacctgaacgagtccgtggagatcaactgcacccgccccaacaacaacatgcgcaagtccatccgcatcggccccggccagaccttctacgccctgggcgacatcatcggcgacatccgccagccccactgcaacatctccgagatcaagtggaacaagaccctgcagcgcgtgtccgagaagctgcgcgagcacttcaacaagaccatcatcttcaaccagtcctccggcggcgacctggagatcaccacccactccttcaactgcggcggcgagttcttctactgcaacacctccgacctgttcttcaacaagaccttcaacgagacctactccaccggctccaactccaccaactccaacatcaccctgccctgccgcatcaagcagatcatcaacatgtggcaggaggtgggccgctgcatgtacgccccccccatcgccggcaacatcacctgcaagtccaacatcaccggcctgctgctgacccgcgacggcggcggcaacaactccaccgaggagaccttccgccccggcggcggcaacatgcgcgacaactggcgctccgagctgtacaagtacaaggtggtggaggtgaagcccctgggcatcgcccccaccgagtgccgccgccgcgtggtgcagggcggcggcggctccggcggcggcggctccgccgtggtgggcctgggcgccgtgttcctgggcttcctgggcaccgccggctccaccatgggcgccgcctccatgaccctgaccgtgcaggcccgccagctgctgggctccgccggctccgccggctccggctccgccggctccggctccgccggctccggctccgccggctccaccgtgtggggcttcaagcagctgcaggcccgcgtgctggccatcgagcgctacctggaggtgcagcagctgctgggcatgtggggctgctccggcaagctgatctgctgcaccaacgtgccctggaactcctcctggtccaacaagacctacaacgagatctgggacaacatgacctggatgcagtgggaccgcgagatcggcaactacaccgacaccatctacaagctgctggaggtgtcccagttccagcaggagatcaacgagaaggacctgctggccctggactcctggaacaacctgtggaactggttcgacatctccaagtggctgtggtacatcaagatcttcatcatgatcgtgggcggcctgatcggcctgcgcatcatcttcgccgtgctgtccctggtgaaccgcgtgcgccagggcatctaataaactagtagtgactgactaggatctggttaccactaaaccagcctcaagaacacccgaatggagtctctaagctacataataccaacttacacttacaaaatgttgtcccccaaaatgtagccattcgtatctgctcctaataaaaagaaagtttcttcacattctaaaaaaaaaaaaaaaaaaaaaaaaaaaaaaaaaaaaaaaaaaaaaaaaaaaaaaaaaaaaaaaaaaaaaaaaaaaaaaaaaaaaaaaaaaaaaaaaaaaaa

SEQ ID NO: 421 - DNA, 2523 bp, synthetic construct
  source 1..2523: mol_type = other DNA
agcataaaagtctcaacacaacatatacaaaacaaacgaatctcaagcaatcaagcattctacttctattgcagcaatttaaatcatttcttttaaagcaaaagcaattttctgaaaattttcaccatttacgaacgatagcgctgccaccatggactccaagggctcctcccagaagggctcccgcctgctgctgctgctggtggtgtccaacctgctgctgccccagggcgtgctggccctgtgggtgaccgtgtactacggcgtgcccgtgtggcgcgaggccaagaccaccctgttctgcgcctccgacgccaagtcctacgagaaggaggtggccaacatctgggccacccacgcctgcgtgcccaccgaccccaacccccaggagctggtgctgaagaacgtgaccgagaacttcaacatgtggaagaacgacatggtggaccagatgcacgaggacatcatctccctgtgggaccagtccctgaagccctgcgtgaagctgacccccctgtgcgtgaccctgcactgctccacctacaacaacacccacaacatctccaaggagatcaagaactgctccttcaacgccaccaccgagctgcgcaacaagcgccgcaaggagtacgccctgttctaccgcctggacatcgtgcccctgaacaagaacggccgccagtaccgcctgatcaactgcaacacctccgtgtgcacccaggtgtgccccaagctgaccttcgaccccatccccatccactactgcgcccccgccggctacgccatcctgaagtgcaacaacaagaccttcaacggcaccggcccctgcaacaacgtgtccaccgtgcagtgcacccacggcatcaagcccgtgctgtccacccagctgctgctgaacggctccctggccgaggaggagatcatcatccgctccgagaacctgaccgacaacgtgaagaccatcatcgtgcacctgaacgagtccgtggagatcaactgcacccgccccaacaacaacacccgcaagtccatccgcatcggccccggccagtggttctacgccaccggcgacatcatcggcgacatccgccaggcccactgcaacatctccgagatcaagtggaacaagaccctgcagcgcgtgtccgagaagctgcgcgagcacttcaacaagaccatcatcttcaaccagtcctccggcggcgacctggagatcaccacccactccttcaactgcggcggcgagttcttctactgcaacacctccgacctgttcttcaacaagaccttcaacgagacctactccaccggctccaactccaccaactccaacatcaccctgccctgccgcatcaagcagatcatcaacatgtggcaggaggtgggccgctgcatgtacgcctcccccatcgccggcgagatcacctgcaagtccaacatcaccggcctgctgctgacccgcgacggcggcggcaacaactccaccgaggagaccttccgccccggcggcggcaacatgcgcgacaactggcgctccgagctgtacaagtacaaggtggtggaggtgaagcccctgggcatcgcccccaccgagtgccgccgccgcgtggtgcagggcggcggcggctccggcggcggcggctccgccgtggtgggcctgggcgccgtgttcctgggcttcctgggcaccgccggctccaccatgggcgccgcctccatgaccctgaccgtgcaggcccgccagctgctgggctccgccggctccgccggctccggctccgccggctccggctccgccggctccggctccgccggctccaccgtgtggggcatcaagcagctgcaggcccgcgtgctggccatcgagcgctacctgaaggaccagcagctgctgggcatgtggggctgctccggcaagctgatctgctgcaccaacgtgtactggaactcctcctggtccaacaagacctacaacgagatctgggacaacatgacctggatgcagtgggaccgcgagatcgacaactacaccgacaccatctacaagctgctggaggtgtcccagaagcagcaggagaagaacgagcaggacctgctggccctggactcctggaacaacctgtggaactggttcgacatctccaagtggctgtggtacatcaagatcttcatcatgatcgtgggcggcctgatcggcctgcgcatcatcttcgccgtgctgtccctggtgaaccgcgtgcgccagggcatctaataaactagtagtgactgactaggatctggttaccactaaaccagcctcaagaacacccgaatggagtctctaagctacataataccaacttacacttacaaaatgttgtcccccaaaatgtagccattcgtatctgctcctaataaaaagaaagtttcttcacattctaaaaaaaaaaaaaaaaaaaaaaaaaaaaaaaaaaaaaaaaaaaaaaaaaaaaaaaaaaaaaaaaaaaaaaaaaaaaaaaaaaaaaaaaaaaaaaaaaaaaa

SEQ ID NO: 422 - DNA, 2523 bp, synthetic construct
  source 1..2523: mol_type = other DNA
agcataaaagtctcaacacaacatatacaaaacaaacgaatctcaagcaatcaagcattctacttctattgcagcaatttaaatcatttcttttaaagcaaaagcaattttctgaaaattttcaccatttacgaacgatagcgctgccaccatggactccaagggctcctcccagaagggctcccgcctgctgctgctgctggtggtgtccaacctgctgctgccccagggcgtgctggccctgtgggtgaccgtgtactacggcgtgcccgtgtggcgcgaggccaagaccaccctgttctgcgcctccgacgccaagtcctacgagaaggaggtggccaacatctgggccacccacgcctgcgtgcccaccgaccccaacccccaggagctggtgctgaagaacgtgaccgagaacttcaacatgtggaagaacgacatggtggaccagatgcacgaggacatcatctccctgtgggaccagtccctgaagccctgcgtgaagctgacccccctgtgcgtgaccctgcactgctccacctacaacaacacccacaacatctccaaggagatcaagaactgctccttcaacgccaccaccgagctgcgcaacaagcgccgcaaggagtacgccctgttctaccgcctggacatcgtgcccctgaacaagaacggccgccagtaccgcctgatcaactgcaacacctccgtgtgcacccaggtgtgccccaagctgaccttcgaccccatccccatccactactgcgcccccgccggctacgccatcctgaagtgcaacaacaagaccttcaacggcaccggcccctgcaacaacgtgtccaccgtgcagtgcacccacggcatcaagcccgtgctgtccacccagctgctgctgaacggctccctggccgaggaggagatcatcatccgctccgagaacctgaccgacaacgtgaagaccatcatcgtgcacctgaacgagtccgtggagatcaactgcacccgccccaacaacatgacccgcaagtccatccgcatcggccccggccagtggttctacgccctgggcgacatcatcggcgacatccgccagccccactgcaacatctccgagatcaagtggaacaagaccctgcagcgcgtgtccgagaagctgcgcgagcacttcaacaagaccatcatcttcaaccagtcctccggcggcgacctggagatcaccacccactccttcaactgcggcggcgagttcttctactgcaacacctccgacctgttcttcaacaagaccttcaacgagacctactccaccggctccaactccaccaactccaacatcaccctgccctgccgcatcaagcagatcatcaacatgtggcaggaggtgggccgctgcatgtacgccccccccatcgccggcaacatcacctgcaagtccaacatcaccggcctgctgctgacccgcgacggcggcggcaacaactccaccgaggagaccttccgccccggcggcggcaacatgcgcgacaactggcgctccgagctgtacaagtacaaggtggtggaggtgaagcccctgggcatcgcccccaccgagtgccgccgccgcgtggtgcagggcggcggcggctccggcggcggcggctccgccgtggtgggcctgggcgccgtgttcctgggcttcctgggcaccgccggctccaccatgggcgccgcctccatgaccctgaccgtgcaggcccgccagctgctgggctccgccggctccgccggctccggctccgccggctccggctccgccggctccggctccgccggctccaccgtgtggggcttcaagcagctgcaggcccgcgtgctggccatcgagcgctacctggaggtgcagcagctgctgggcatgtggggctgctccggcaagctgatctgctgcaccaacgtgccctggaactcctcctggtccaacaagacctacaacgagatctgggacaacatgacctggatgcagtgggaccgcgagatcggcaactacaccgacaccatctacaagctgctggaggtgtcccagttccagcaggagaagaacgagcaggacctgctggccctggactcctggaacaacctgtggaactggttcgacatctccaagtggctgtggtacatcaagatcttcatcatgatcgtgggcggcctgatcggcctgcgcatcatcttcgccgtgctgtccctggtgaaccgcgtgcgccagggcatctaataaactagtagtgactgactaggatctggttaccactaaaccagcctcaagaacacccgaatggagtctctaagctacataataccaacttacacttacaaaatgttgtcccccaaaatgtagccattcgtatctgctcctaataaaaagaaagtttcttcacattctaaaaaaaaaaaaaaaaaaaaaaaaaaaaaaaaaaaaaaaaaaaaaaaaaaaaaaaaaaaaaaaaaaaaaaaaaaaaaaaaaaaaaaaaaaaaaaaaaaaaa

SEQ ID NO: 423 - DNA, 2652 bp, synthetic construct
  source 1..2652: mol_type = other DNA
agcataaaagtctcaacacaacatatacaaaacaaacgaatctcaagcaatcaagcattctacttctattgcagcaatttaaatcatttcttttaaagcaaaagcaattttctgaaaattttcaccatttacgaacgatagcgctgccaccatggactccaagggctcctcccagaagggctcccgcctgctgctgctgctggtggtgtccaacctgctgctgccccagggcgtgctggccctgtgggtgaccgtgtactacggcgtgcccgtgtggcgcgaggccaagaccaccctgttctgcgcctccgacgccaagtcctacgagaaggaggtgcacaacatctgggccacccacgcctgcgtgcccaccgaccccaacccccaggagctggtgctgaagaacgtgaccgagaacttcaacatgtggaagaacgacatggtggaccagatgcacgaggacatcatctccctgtgggaccagtccctgaagccctgcgtgaagctgacccccctgtgcgtgaccctgcactgctccacctacaacaacacccacaacatctccaaggagatcaagaactgctccttcaacgccaccaccgagctgcgcaacaagcgccgcaaggagtacgccctgttctaccgcctggacatcgtgcccctgaacaagaacggccgccagtaccgcctgatcaactgcaacacctccgtgtgcacccaggtgtgccccaagctgaccttcgaccccatccccatccactactgcgcccccgccggctacgccatcctgaagtgcaacaacaagaccttcaacggcaccggcccctgcaacaacgtgtccaccgtgcagtgcacccacggcatcaagcccgtgctgtccacccagctgctgctgaacggctccctggccgaggaggagatcatcatccgctccgagaacctgaccgacaacgtgaagaccatcatcgtgcacctgaacgagtccgtggagatcaactgcacccgccccaacaacaacacccgcaagtccatccgcatcggccccggccagaccttctacgccaccggcgacatcatcggcgacatccgccaggcccactgcaacatctccgagatcaagtggaacaagaccctgcagcgcgtgtccgagaagctgcgcgagcacttcaacaagaccatcatcttcaaccagtcctccggcggcgacctggagatcaccacccactccttcaactgcggcggcgagttcttctactgcaacacctccgacctgttcttcaacaagaccttcaacgagacctactccaccggctccaactccaccaactccaacatcaccctgccctgccgcatcaagcagatcatcaacatgtggcaggaggtgggccgctgcatgtacgcctcccccatcgccggcgagatcacctgcaagtccaacatcaccggcctgctgctgacccgcgacggcggcggcaacaactccaccgaggagaccttccgccccggcggcggcaacatgcgcgacaactggcgctccgagctgtacaagtacaaggtggtggaggtgaagcccctgggcatcgcccccaccgagtgccgccgccgcgtggtgcagggcggcggcggctccggcggcggcggctccgccgtggtgggcctgggcgccgtgttcctgggcttcctgggcaccgccggctccaccatgggcgccgcctccatgaccctgaccgtgcaggcccgccagctgctgggctccgccggctccgccggctccggctccgccggctccggctccgccggctccggctccgccggctccaccgtgtggggcatcaagcagctgcaggcccgcgtgctggccatcgagcgctacctgaaggaccagcagctgctgggcatgtggggctgctccggcaagctgatctgctgcaccaacgtgtactggaactcctcctggtccaacaagacctacaacgagatctgggacaacatgacctggatgcagtgggaccgcgagatcgacaactacaccgacaccatctacaagctgctggaggtgtcccagaagcagcaggagtccaacgagaaggacctgctggccctggactcctggaacaacctgtggaactggttcgacatctccaagtggctgtggtacatcaagatcttcatcatgatcgtgggcggcctgatcggcctgcgcatcatcttcgccgtgctgtccctggtgaaccgcgtgcgccagggcatctcccccctgtccttccagaccctgacccccaacccccgcgagctggaccgcctgggcggcatcgaggaggagggcggcgagcaggaccgcgaccgctccatccgcctggtgtccggcttcttctccctgtaataaactagtagtgactgactaggatctggttaccactaaaccagcctcaagaacacccgaatggagtctctaagctacataataccaacttacacttacaaaatgttgtcccccaaaatgtagccattcgtatctgctcctaataaaaagaaagtttcttcacattctaaaaaaaaaaaaaaaaaaaaaaaaaaaaaaaaaaaaaaaaaaaaaaaaaaaaaaaaaaaaaaaaaaaaaaaaaaaaaaaaaaaaaaaaaaaaaaaaaaaaa

SEQ ID NO: 424 - DNA, 2652 bp, synthetic construct
  source 1..2652: mol_type = other DNA
agcataaaagtctcaacacaacatatacaaaacaaacgaatctcaagcaatcaagcattctacttctattgcagcaatttaaatcatttcttttaaagcaaaagcaattttctgaaaattttcaccatttacgaacgatagcgctgccaccatggactccaagggctcctcccagaagggctcccgcctgctgctgctgctggtggtgtccaacctgctgctgccccagggcgtgctggccctgtgggtgaccgtgtactacggcgtgcccgtgtggcgcgaggccaagaccaccctgttctgcgcctccgacgccaagtcctacgagaaggaggtgcacaacatctgggccacccacgcctgcgtgcccaccgaccccaacccccaggagctggtgctgaagaacgtgaccgagaacttcaacatgtggaagaacgacatggtggaccagatgcacgaggacatcatctccctgtgggaccagtccctgaagccctgcgtgaagctgacccccctgtgcgtgaccctgcactgctccacctacaacaacacccacaacatctccaaggagatcaagaactgctccttcaacgccaccaccgagctgcgcaacaagcgccgcaaggagtacgccctgttctaccgcctggacatcgtgcccctgaacaagaacggccgccagtaccgcctgatcaactgcaacacctccgtgtgcacccaggtgtgccccaagctgaccttcgaccccatccccatccactactgcgcccccgccggctacgccatcctgaagtgcaacaacaagaccttcaacggcaccggcccctgcaacaacgtgtccaccgtgcagtgcacccacggcatcaagcccgtgctgtccacccagctgctgctgaacggctccctggccgaggaggagatcatcatccgctccgagaacctgaccgacaacgtgaagaccatcatcgtgcacctgaacgagtccgtggagatcaactgcacccgccccaacaacaacatgcgcaagtccatccgcatcggccccggccagaccttctacgccctgggcgacatcatcggcgacatccgccagccccactgcaacatctccgagatcaagtggaacaagaccctgcagcgcgtgtccgagaagctgcgcgagcacttcaacaagaccatcatcttcaaccagtcctccggcggcgacctggagatcaccacccactccttcaactgcggcggcgagttcttctactgcaacacctccgacctgttcttcaacaagaccttcaacgagacctactccaccggctccaactccaccaactccaacatcaccctgccctgccgcatcaagcagatcatcaacatgtggcaggaggtgggccgctgcatgtacgccccccccatcgccggcaacatcacctgcaagtccaacatcaccggcctgctgctgacccgcgacggcggcggcaacaactccaccgaggagaccttccgccccggcggcggcaacatgcgcgacaactggcgctccgagctgtacaagtacaaggtggtggaggtgaagcccctgggcatcgcccccaccgagtgccgccgccgcgtggtgcagggcggcggcggctccggcggcggcggctccgccgtggtgggcctgggcgccgtgttcctgggcttcctgggcaccgccggctccaccatgggcgccgcctccatgaccctgaccgtgcaggcccgccagctgctgggctccgccggctccgccggctccggctccgccggctccggctccgccggctccggctccgccggctccaccgtgtggggcttcaagcagctgcaggcccgcgtgctggccatcgagcgctacctggaggtgcagcagctgctgggcatgtggggctgctccggcaagctgatctgctgcaccaacgtgccctggaactcctcctggtccaacaagacctacaacgagatctgggacaacatgacctggatgcagtgggaccgcgagatcggcaactacaccgacaccatctacaagctgctggaggtgtcccagttccagcaggagatcaacgagaaggacctgctggccctggactcctggaacaacctgtggaactggttcgacatctccaagtggctgtggtacatcaagatcttcatcatgatcgtgggcggcctgatcggcctgcgcatcatcttcgccgtgctgtccctggtgaaccgcgtgcgccagggcatctcccccctgtccttccagaccctgacccccaacccccgcgagctggaccgcctgggcggcatcgaggaggagggcggcgagcaggaccgcgaccgctccatccgcctggtgtccggcttcttctccctgtaataaactagtagtgactgactaggatctggttaccactaaaccagcctcaagaacacccgaatggagtctctaagctacataataccaacttacacttacaaaatgttgtcccccaaaatgtagccattcgtatctgctcctaataaaaagaaagtttcttcacattctaaaaaaaaaaaaaaaaaaaaaaaaaaaaaaaaaaaaaaaaaaaaaaaaaaaaaaaaaaaaaaaaaaaaaaaaaaaaaaaaaaaaaaaaaaaaaaaaaaaaa

SEQ ID NO: 425 - DNA, 2652 bp, synthetic construct
  source 1..2652: mol_type = other DNA
agcataaaagtctcaacacaacatatacaaaacaaacgaatctcaagcaatcaagcattctacttctattgcagcaatttaaatcatttcttttaaagcaaaagcaattttctgaaaattttcaccatttacgaacgatagcgctgccaccatggactccaagggctcctcccagaagggctcccgcctgctgctgctgctggtggtgtccaacctgctgctgccccagggcgtgctggccctgtgggtgaccgtgtactacggcgtgcccgtgtggcgcgaggccaagaccaccctgttctgcgcctccgacgccaagtcctacgagaaggaggtggccaacatctgggccacccacgcctgcgtgcccaccgaccccaacccccaggagctggtgctgaagaacgtgaccgagaacttcaacatgtggaagaacgacatggtggaccagatgcacgaggacatcatctccctgtgggaccagtccctgaagccctgcgtgaagctgacccccctgtgcgtgaccctgcactgctccacctacaacaacacccacaacatctccaaggagatcaagaactgctccttcaacgccaccaccgagctgcgcaacaagcgccgcaaggagtacgccctgttctaccgcctggacatcgtgcccctgaacaagaacggccgccagtaccgcctgatcaactgcaacacctccgtgtgcacccaggtgtgccccaagctgaccttcgaccccatccccatccactactgcgcccccgccggctacgccatcctgaagtgcaacaacaagaccttcaacggcaccggcccctgcaacaacgtgtccaccgtgcagtgcacccacggcatcaagcccgtgctgtccacccagctgctgctgaacggctccctggccgaggaggagatcatcatccgctccgagaacctgaccgacaacgtgaagaccatcatcgtgcacctgaacgagtccgtggagatcaactgcacccgccccaacaacaacacccgcaagtccatccgcatcggccccggccagtggttctacgccaccggcgacatcatcggcgacatccgccaggcccactgcaacatctccgagatcaagtggaacaagaccctgcagcgcgtgtccgagaagctgcgcgagcacttcaacaagaccatcatcttcaaccagtcctccggcggcgacctggagatcaccacccactccttcaactgcggcggcgagttcttctactgcaacacctccgacctgttcttcaacaagaccttcaacgagacctactccaccggctccaactccaccaactccaacatcaccctgccctgccgcatcaagcagatcatcaacatgtggcaggaggtgggccgctgcatgtacgcctcccccatcgccggcgagatcacctgcaagtccaacatcaccggcctgctgctgacccgcgacggcggcggcaacaactccaccgaggagaccttccgccccggcggcggcaacatgcgcgacaactggcgctccgagctgtacaagtacaaggtggtggaggtgaagcccctgggcatcgcccccaccgagtgccgccgccgcgtggtgcagggcggcggcggctccggcggcggcggctccgccgtggtgggcctgggcgccgtgttcctgggcttcctgggcaccgccggctccaccatgggcgccgcctccatgaccctgaccgtgcaggcccgccagctgctgggctccgccggctccgccggctccggctccgccggctccggctccgccggctccggctccgccggctccaccgtgtggggcatcaagcagctgcaggcccgcgtgctggccatcgagcgctacctgaaggaccagcagctgctgggcatgtggggctgctccggcaagctgatctgctgcaccaacgtgtactggaactcctcctggtccaacaagacctacaacgagatctgggacaacatgacctggatgcagtgggaccgcgagatcgacaactacaccgacaccatctacaagctgctggaggtgtcccagaagcagcaggagaagaacgagcaggacctgctggccctggactcctggaacaacctgtggaactggttcgacatctccaagtggctgtggtacatcaagatcttcatcatgatcgtgggcggcctgatcggcctgcgcatcatcttcgccgtgctgtccctggtgaaccgcgtgcgccagggcatctcccccctgtccttccagaccctgacccccaacccccgcgagctggaccgcctgggcggcatcgaggaggagggcggcgagcaggaccgcgaccgctccatccgcctggtgtccggcttcttctccctgtaataaactagtagtgactgactaggatctggttaccactaaaccagcctcaagaacacccgaatggagtctctaagctacataataccaacttacacttacaaaatgttgtcccccaaaatgtagccattcgtatctgctcctaataaaaagaaagtttcttcacattctaaaaaaaaaaaaaaaaaaaaaaaaaaaaaaaaaaaaaaaaaaaaaaaaaaaaaaaaaaaaaaaaaaaaaaaaaaaaaaaaaaaaaaaaaaaaaaaaaaaaa

SEQ ID NO: 426 - DNA, 2652 bp, synthetic construct
  source 1..2652: mol_type = other DNA
agcataaaagtctcaacacaacatatacaaaacaaacgaatctcaagcaatcaagcattctacttctattgcagcaatttaaatcatttcttttaaagcaaaagcaattttctgaaaattttcaccatttacgaacgatagcgctgccaccatggactccaagggctcctcccagaagggctcccgcctgctgctgctgctggtggtgtccaacctgctgctgccccagggcgtgctggccctgtgggtgaccgtgtactacggcgtgcccgtgtggcgcgaggccaagaccaccctgttctgcgcctccgacgccaagtcctacgagaaggaggtggccaacatctgggccacccacgcctgcgtgcccaccgaccccaacccccaggagctggtgctgaagaacgtgaccgagaacttcaacatgtggaagaacgacatggtggaccagatgcacgaggacatcatctccctgtgggaccagtccctgaagccctgcgtgaagctgacccccctgtgcgtgaccctgcactgctccacctacaacaacacccacaacatctccaaggagatcaagaactgctccttcaacgccaccaccgagctgcgcaacaagcgccgcaaggagtacgccctgttctaccgcctggacatcgtgcccctgaacaagaacggccgccagtaccgcctgatcaactgcaacacctccgtgtgcacccaggtgtgccccaagctgaccttcgaccccatccccatccactactgcgcccccgccggctacgccatcctgaagtgcaacaacaagaccttcaacggcaccggcccctgcaacaacgtgtccaccgtgcagtgcacccacggcatcaagcccgtgctgtccacccagctgctgctgaacggctccctggccgaggaggagatcatcatccgctccgagaacctgaccgacaacgtgaagaccatcatcgtgcacctgaacgagtccgtggagatcaactgcacccgccccaacaacatgacccgcaagtccatccgcatcggccccggccagtggttctacgccctgggcgacatcatcggcgacatccgccagccccactgcaacatctccgagatcaagtggaacaagaccctgcagcgcgtgtccgagaagctgcgcgagcacttcaacaagaccatcatcttcaaccagtcctccggcggcgacctggagatcaccacccactccttcaactgcggcggcgagttcttctactgcaacacctccgacctgttcttcaacaagaccttcaacgagacctactccaccggctccaactccaccaactccaacatcaccctgccctgccgcatcaagcagatcatcaacatgtggcaggaggtgggccgctgcatgtacgccccccccatcgccggcaacatcacctgcaagtccaacatcaccggcctgctgctgacccgcgacggcggcggcaacaactccaccgaggagaccttccgccccggcggcggcaacatgcgcgacaactggcgctccgagctgtacaagtacaaggtggtggaggtgaagcccctgggcatcgcccccaccgagtgccgccgccgcgtggtgcagggcggcggcggctccggcggcggcggctccgccgtggtgggcctgggcgccgtgttcctgggcttcctgggcaccgccggctccaccatgggcgccgcctccatgaccctgaccgtgcaggcccgccagctgctgggctccgccggctccgccggctccggctccgccggctccggctccgccggctccggctccgccggctccaccgtgtggggcttcaagcagctgcaggcccgcgtgctggccatcgagcgctacctggaggtgcagcagctgctgggcatgtggggctgctccggcaagctgatctgctgcaccaacgtgccctggaactcctcctggtccaacaagacctacaacgagatctgggacaacatgacctggatgcagtgggaccgcgagatcggcaactacaccgacaccatctacaagctgctggaggtgtcccagttccagcaggagaagaacgagcaggacctgctggccctggactcctggaacaacctgtggaactggttcgacatctccaagtggctgtggtacatcaagatcttcatcatgatcgtgggcggcctgatcggcctgcgcatcatcttcgccgtgctgtccctggtgaaccgcgtgcgccagggcatctcccccctgtccttccagaccctgacccccaacccccgcgagctggaccgcctgggcggcatcgaggaggagggcggcgagcaggaccgcgaccgctccatccgcctggtgtccggcttcttctccctgtaataaactagtagtgactgactaggatctggttaccactaaaccagcctcaagaacacccgaatggagtctctaagctacataataccaacttacacttacaaaatgttgtcccccaaaatgtagccattcgtatctgctcctaataaaaagaaagtttcttcacattctaaaaaaaaaaaaaaaaaaaaaaaaaaaaaaaaaaaaaaaaaaaaaaaaaaaaaaaaaaaaaaaaaaaaaaaaaaaaaaaaaaaaaaaaaaaaaaaaaaaaa

SEQ ID NO: 427 - DNA, 2637 bp, synthetic construct
  source 1..2637: mol_type = other DNA
agcataaaagtctcaacacaacatatacaaaacaaacgaatctcaagcaatcaagcattctacttctattgcagcaatttaaatcatttcttttaaagcaaaagcaattttctgaaaattttcaccatttacgaacgatagcgctgccaccatggactccaagggctcctcccagaagggctcccgcctgctgctgctgctggtggtgtccaacctgctgctgccccagggcgtgctggccctgtgggtgaccgtgtactacggcgtgcccgtgtggcgcgaggccaagaccaccctgttctgcgcctccgacgccaagtcctacgagaaggaggtgcacaacatctgggccacccacgcctgcgtgcccaccgaccccaacccccaggagctggtgctgaagaacgtgaccgagaacttcaacatgtggaagaacgacatggtggaccagatgcacgaggacatcatctccctgtgggaccagtccctgaagccctgcgtgaagctgacccccctgtgcgtgaccctgcactgctccacctacaacaacacccacaacatctccaaggagatcaagaactgctccttcaacgccaccaccgagctgcgcaacaagcgccgcaaggagtacgccctgttctaccgcctggacatcgtgcccctgaacaagaacggccgccagtaccgcctgatcaactgcaacacctccgtgtgcacccaggtgtgccccaagctgaccttcgaccccatccccatccactactgcgcccccgccggctacgccatcctgaagtgcaacaacaagaccttcaacggcaccggcccctgcaacaacgtgtccaccgtgcagtgcacccacggcatcaagcccgtgctgtccacccagctgctgctgaacggctccctggccgaggaggagatcatcatccgctccgagaacctgaccgacaacgtgaagaccatcatcgtgcacctgaacgagtccgtggagatcaactgcacccgccccaacaacaacacccgcaagtccatccgcatcggccccggccagaccttctacgccaccggcgacatcatcggcgacatccgccaggcccactgcaacatctccgagatcaagtggaacaagaccctgcagcgcgtgtccgagaagctgcgcgagcacttcaacaagaccatcatcttcaaccagtcctccggcggcgacctggagatcaccacccactccttcaactgcggcggcgagttcttctactgcaacacctccgacctgttcttcaacaagaccttcaacgagacctactccaccggctccaactccaccaactccaacatcaccctgccctgccgcatcaagcagatcatcaacatgtggcaggaggtgggccgctgcatgtacgcctcccccatcgccggcgagatcacctgcaagtccaacatcaccggcctgctgctgacccgcgacggcggcggcaacaactccaccgaggagaccttccgccccggcggcggcaacatgcgcgacaactggcgctccgagctgtacaagtacaaggtggtggaggtgaagcccctgggcatcgcccccaccgagtgccgccgccgcgtggtgcagggcggcggcggctccggcggcggcggctccgccgtggtgggcctgggcgccgtgttcctgggcttcctgggcaccgccggctccaccatgggcgccgcctccatgaccctgaccgtgcaggcccgccagctgctgggctccgccggctccgccggctccggctccgccggctccggctccgccggctccggctccgccggctccaccgtgtggggcatcaagcagctgcaggcccgcgtgctggccatcgagcgctacctgaaggaccagcagctgctgggcatgtggggctgctccggcaagctgatctgctgcaccaacgtgtactggaactcctcctggtccaacaagacctacaacgagatctgggacaacatgacctggatgcagtgggaccgcgagatcgacaactacaccgacaccatctacaagctgctggaggtgtcccagaagcagcaggagtccaacgagaaggacctgctggccctggactcctggaacaacctgtggaactggttcgacatctccaagtggctgtggtacatcaagatcttcatcatgatcgtgggcggcctgatcggcctgcgcatcatcttcgccgtgctgtccctggtgaaccgcgtgcgccagggcatctcccccctgtccttccagaccctgacccccaacccccgcgagctggaccgcctgggcggcatcgaggaggagggcggcgagcaggaccgcgaccgctccatccgcctggtgtcctaataaactagtagtgactgactaggatctggttaccactaaaccagcctcaagaacacccgaatggagtctctaagctacataataccaacttacacttacaaaatgttgtcccccaaaatgtagccattcgtatctgctcctaataaaaagaaagtttcttcacattctaaaaaaaaaaaaaaaaaaaaaaaaaaaaaaaaaaaaaaaaaaaaaaaaaaaaaaaaaaaaaaaaaaaaaaaaaaaaaaaaaaaaaaaaaaaaaaaaaaaaa

SEQ ID NO: 428 - DNA, 2637 bp, synthetic construct
  source 1..2637: mol_type = other DNA
agcataaaagtctcaacacaacatatacaaaacaaacgaatctcaagcaatcaagcattctacttctattgcagcaatttaaatcatttcttttaaagcaaaagcaattttctgaaaattttcaccatttacgaacgatagcgctgccaccatggactccaagggctcctcccagaagggctcccgcctgctgctgctgctggtggtgtccaacctgctgctgccccagggcgtgctggccctgtgggtgaccgtgtactacggcgtgcccgtgtggcgcgaggccaagaccaccctgttctgcgcctccgacgccaagtcctacgagaaggaggtgcacaacatctgggccacccacgcctgcgtgcccaccgaccccaacccccaggagctggtgctgaagaacgtgaccgagaacttcaacatgtggaagaacgacatggtggaccagatgcacgaggacatcatctccctgtgggaccagtccctgaagccctgcgtgaagctgacccccctgtgcgtgaccctgcactgctccacctacaacaacacccacaacatctccaaggagatcaagaactgctccttcaacgccaccaccgagctgcgcaacaagcgccgcaaggagtacgccctgttctaccgcctggacatcgtgcccctgaacaagaacggccgccagtaccgcctgatcaactgcaacacctccgtgtgcacccaggtgtgccccaagctgaccttcgaccccatccccatccactactgcgcccccgccggctacgccatcctgaagtgcaacaacaagaccttcaacggcaccggcccctgcaacaacgtgtccaccgtgcagtgcacccacggcatcaagcccgtgctgtccacccagctgctgctgaacggctccctggccgaggaggagatcatcatccgctccgagaacctgaccgacaacgtgaagaccatcatcgtgcacctgaacgagtccgtggagatcaactgcacccgccccaacaacaacatgcgcaagtccatccgcatcggccccggccagaccttctacgccctgggcgacatcatcggcgacatccgccagccccactgcaacatctccgagatcaagtggaacaagaccctgcagcgcgtgtccgagaagctgcgcgagcacttcaacaagaccatcatcttcaaccagtcctccggcggcgacctggagatcaccacccactccttcaactgcggcggcgagttcttctactgcaacacctccgacctgttcttcaacaagaccttcaacgagacctactccaccggctccaactccaccaactccaacatcaccctgccctgccgcatcaagcagatcatcaacatgtggcaggaggtgggccgctgcatgtacgccccccccatcgccggcaacatcacctgcaagtccaacatcaccggcctgctgctgacccgcgacggcggcggcaacaactccaccgaggagaccttccgccccggcggcggcaacatgcgcgacaactggcgctccgagctgtacaagtacaaggtggtggaggtgaagcccctgggcatcgcccccaccgagtgccgccgccgcgtggtgcagggcggcggcggctccggcggcggcggctccgccgtggtgggcctgggcgccgtgttcctgggcttcctgggcaccgccggctccaccatgggcgccgcctccatgaccctgaccgtgcaggcccgccagctgctgggctccgccggctccgccggctccggctccgccggctccggctccgccggctccggctccgccggctccaccgtgtggggcttcaagcagctgcaggcccgcgtgctggccatcgagcgctacctggaggtgcagcagctgctgggcatgtggggctgctccggcaagctgatctgctgcaccaacgtgccctggaactcctcctggtccaacaagacctacaacgagatctgggacaacatgacctggatgcagtgggaccgcgagatcggcaactacaccgacaccatctacaagctgctggaggtgtcccagttccagcaggagatcaacgagaaggacctgctggccctggactcctggaacaacctgtggaactggttcgacatctccaagtggctgtggtacatcaagatcttcatcatgatcgtgggcggcctgatcggcctgcgcatcatcttcgccgtgctgtccctggtgaaccgcgtgcgccagggcatctcccccctgtccttccagaccctgacccccaacccccgcgagctggaccgcctgggcggcatcgaggaggagggcggcgagcaggaccgcgaccgctccatccgcctggtgtcctaataaactagtagtgactgactaggatctggttaccactaaaccagcctcaagaacacccgaatggagtctctaagctacataataccaacttacacttacaaaatgttgtcccccaaaatgtagccattcgtatctgctcctaataaaaagaaagtttcttcacattctaaaaaaaaaaaaaaaaaaaaaaaaaaaaaaaaaaaaaaaaaaaaaaaaaaaaaaaaaaaaaaaaaaaaaaaaaaaaaaaaaaaaaaaaaaaaaaaaaaaaa

SEQ ID NO: 429 - DNA, 2637 bp, synthetic construct; identical to SEQ ID NO: 408
  source 1..2637: mol_type = other DNA

SEQ ID NO: 430 - DNA, 2637 bp, synthetic construct
  source 1..2637: mol_type = other DNA
agcataaaagtctcaacacaacatatacaaaacaaacgaatctcaagcaatcaagcattctacttctattgcagcaatttaaatcatttcttttaaagcaaaagcaattttctgaaaattttcaccatttacgaacgatagcgctgccaccatggactccaagggctcctcccagaagggctcccgcctgctgctgctgctggtggtgtccaacctgctgctgccccagggcgtgctggccctgtgggtgaccgtgtactacggcgtgcccgtgtggcgcgaggccaagaccaccctgttctgcgcctccgacgccaagtcctacgagaaggaggtggccaacatctgggccacccacgcctgcgtgcccaccgaccccaacccccaggagctggtgctgaagaacgtgaccgagaacttcaacatgtggaagaacgacatggtggaccagatgcacgaggacatcatctccctgtgggaccagtccctgaagccctgcgtgaagctgacccccctgtgcgtgaccctgcactgctccacctacaacaacacccacaacatctccaaggagatcaagaactgctccttcaacgccaccaccgagctgcgcaacaagcgccgcaaggagtacgccctgttctaccgcctggacatcgtgcccctgaacaagaacggccgccagtaccgcctgatcaactgcaacacctccgtgtgcacccaggtgtgccccaagctgaccttcgaccccatccccatccactactgcgcccccgccggctacgccatcctgaagtgcaacaacaagaccttcaacggcaccggcccctgcaacaacgtgtccaccgtgcagtgcacccacggcatcaagcccgtgctgtccacccagctgctgctgaacggctccctggccgaggaggagatcatcatccgctccgagaacctgaccgacaacgtgaagaccatcatcgtgcacctgaacgagtccgtggagatcaactgcacccgccccaacaacatgacccgcaagtccatccgcatcggccccggccagtggttctacgccctgggcgacatcatcggcgacatccgccagccccactgcaacatctccgagatcaagtggaacaagaccctgcagcgcgtgtccgagaagctgcgcgagcacttcaacaagaccatcatcttcaaccagtcctccggcggcgacctggagatcaccacccactccttcaactgcggcggcgagttcttctactgcaacacctccgacctgttcttcaacaagaccttcaacgagacctactccaccggctccaactccaccaactccaacatcaccctgccctgccgcatcaagcagatcatcaacatgtggcaggaggtgggccgctgcatgtacgccccccccatcgccggcaacatcacctgcaagtccaacatcaccggcctgctgctgacccgcgacggcggcggcaacaactccaccgaggagaccttccgccccggcggcggcaacatgcgcgacaactggcgctccgagctgtacaagtacaaggtggtggaggtgaagcccctgggcatcgcccccaccgagtgccgccgccgcgtggtgcagggcggcggcggctccggcggcggcggctccgccgtggtgggcctgggcgccgtgttcctgggcttcctgggcaccgccggctccaccatgggcgccgcctccatgaccctgaccgtgcaggcccgccagctgctgggctccgccggctccgccggctccggctccgccggctccggctccgccggctccggctccgccggctccaccgtgtggggcttcaagcagctgcaggcccgcgtgctggccatcgagcgctacctggaggtgcagcagctgctgggcatgtggggctgctccggcaagctgatctgctgcaccaacgtgccctggaactcctcctggtccaacaagacctacaacgagatctgggacaacatgacctggatgcagtgggaccgcgagatcggcaactacaccgacaccatctacaagctgctggaggtgtcccagttccagcaggagaagaacgagcaggacctgctggccctggactcctggaacaacctgtggaactggttcgacatctccaagtggctgtggtacatcaagatcttcatcatgatcgtgggcggcctgatcggcctgcgcatcatcttcgccgtgctgtccctggtgaaccgcgtgcgccagggcatctcccccctgtccttccagaccctgacccccaacccccgcgagctggaccgcctgggcggcatcgaggaggagggcggcgagcaggaccgcgaccgctccatccgcctggtgtcctaataaactagtagtgactgactaggatctggttaccactaaaccagcctcaagaacacccgaatggagtctctaagctacataataccaacttacacttacaaaatgttgtcccccaaaatgtagccattcgtatctgctcctaataaaaagaaagtttcttcacattctaaaaaaaaaaaaaaaaaaaaaaaaaaaaaaaaaaaaaaaaaaaaaaaaaaaaaaaaaaaaaaaaaaaaaaaaaaaaaaaaaaaaaaaaaaaaaaaaaaaaa

SEQ ID NO: 431 - DNA, 2976 bp, synthetic construct
  source 1..2976: mol_type = other DNA
agcataaaagtctcaacacaacatatacaaaacaaacgaatctcaagcaatcaagcattctacttctattgcagcaatttaaatcatttcttttaaagcaaaagcaattttctgaaaattttcaccatttacgaacgatagcgctgccaccatggactccaagggctcctcccagaagggctcccgcctgctgctgctgctggtggtgtccaacctgctgctgccccagggcgtgctggccctgtgggtgaccgtgtactacggcgtgcccgtgtggcgcgaggccaagaccaccctgttctgcgcctccgacgccaagtcctacgagaaggaggtgcacaacatctgggccacccacgcctgcgtgcccaccgaccccaacccccaggagctggtgctgaagaacgtgaccgagaacttcaacatgtggaagaacgacatggtggaccagatgcacgaggacatcatctccctgtgggaccagtccctgaagccctgcgtgaagctgacccccctgtgcgtgaccctgcactgctccacctacaacaacacccacaacatctccaaggagatcaagaactgctccttcaacgccaccaccgagctgcgcgacaagcgccgcaaggagtacgccctgttctaccgcctggacatcgtgcccctgaacaagaacggccgccagtaccgcctgatcaactgcaacacctccgtgtgcacccaggtgtgccccaagctgaccttcgaccccatccccatccactactgcgcccccgccggctacgccatcctgaagtgcaacaacaagaccttcaacggcaccggcccctgcaacaacgtgtccaccgtgcagtgcacccacggcatcaagcccgtgctgtccacccagctgctgctgaacggctccctggccgaggaggagatcatcatccgctccgagaacctgaccgacaacgtgaagaccatcatcgtgcacctgaacgagtccgtggagatcaactgcacccgccccaacaacaacatgcgcaagtccatccgcatcggccccggccagaccttctacgccctgggcgacatcatcggcgacatccgccagccccactgcaacatctccgagatcaagtggaacaagaccctgcagcgcgtgtccgagaagctgcgcgagcacttcaacaagaccatcatcttcaaccagtcctccggcggcgacctggagatcaccacccactccttcaactgcggcggcgagttcttctactgcaacacctccgacctgttcttcaacaagaccttcaacgagacctactccaccggctccaactccaccaactccaacatcaccctgccctgccgcatcaagcagatcatcaacatgtggcaggaggtgggccgctgcatgtacgccccccccatcgccggcaacatcacctgcaagtccaacatcaccggcctgctgctgacccgcgacggcggcggcaacaactccaccgaggagaccttccgccccggcggcggcaacatgcgcgacaactggcgctccgagctgtacaagtacaaggtggtggaggtgaagcccctgggcatcgcccccaccgagtgccgccgccgcgtggtgcagggcggcggcggctccggcggcggcggctccgccgtggtgggcctgggcgccgtgttcctgggcttcctgggcaccgccggctccaccatgggcgccgcctccatgaccctgaccgtgcaggcccgccagctgctgggctccgccggctccgccggctccggctccgccggctccggctccgccggctccggctccgccggctccaccgtgtggggcttcaagcagctgcaggcccgcgtgctggccatcgagcgctacctggaggtgcagcagctgctgggcatgtggggctgctccggcaagctgatctgctgcaccaacgtgccctggaactcctcctggtccaacaagacctacaacgagatctgggacaacatgacctggatgcagtgggaccgcgagatcggcaactacaccgacaccatctacaagctgctggaggtgtcccagttccagcaggagatcaacgagaaggacctgctggccctggactcctggaacaacctgtggaactggttcgacatctccaagtggctgtggtacatcaagatcttcatcatgatcgtgggcggcctgatcggcctgcgcatcatcttcgccgtgctgtccctggtgaaccgcgtgcgccagggcatctcccccctgtccttccagaccctgacccccaacccccgcgagctggaccgcctgggcggcatcgaggaggagggcggcgagcaggaccgcgaccgctccatccgcctggtgtccggcttcttctccctggcctggaacgacctgcgctccctgtgcctgttctgctaccaccgcctgcgcgacttcatcctgatcgccggccgcgccgtggagctgctgggccgctcctccctgcagggcctgcagcgcggctgggagatcctgaagtacctgggctccctggtgcagtactggggcctggagctgaagaagtccgccatcaacctgttcgacaccatcgccatcgccgtggccgagggcaccgaccgcatcatcgagttcctgcagcgcatcgtgcgcgccatcctgcacatcccccgccgcatccgccagggcttcgaggccgccgccgcctaataaactagtagtgactgactaggatctggttaccactaaaccagcctcaagaacacccgaatggagtctctaagctacataataccaacttacacttacaaaatgttgtcccccaaaatgtagccattcgtatctgctcctaataaaaagaaagtttcttcacattctaaaaaaaaaaaaaaaaaaaaaaaaaaaaaaaaaaaaaaaaaaaaaaaaaaaaaaaaaaaaaaaaaaaaaaaaaaaaaaaaaaaaaaaaaaaaaaaaaaaaa

SEQ ID NO: 432 - DNA, 2976 bp, synthetic construct
  source 1..2976: mol_type = other DNA
agcataaaagtctcaacacaacatatacaaaacaaacgaatctcaagcaatcaagcattctacttctattgcagcaatttaaatcatttcttttaaagcaaaagcaattttctgaaaattttcaccatttacgaacgatagcgctgccaccatggactccaagggctcctcccagaagggctcccgcctgctgctgctgctggtggtgtccaacctgctgctgccccagggcgtgctggccctgtgggtgaccgtgtactacggcgtgcccgtgtggcgcgaggccaagaccaccctgttctgcgcctccgacgccaagtcctacgagaaggaggtggccaacatctgggccacccacgcctgcgtgcccaccgaccccaacccccaggagctggtgctgaagaacgtgaccgagaacttcaacatgtggaagaacgacatggtggaccagatgcacgaggacatcatctccctgtgggaccagtccctgaagccctgcgtgaagctgacccccctgtgcgtgaccctgcactgctccacctacaacaacacccacaacatctccaaggagatcaagaactgctccttcaacgccaccaccgagctgcgcgacaagcgccgcaaggagtacgccctgttctaccgcctggacatcgtgcccctgaacaagaacggccgccagtaccgcctgatcaactgcaacacctccgtgtgcacccaggtgtgccccaagctgaccttcgaccccatccccatccactactgcgcccccgccggctacgccatcctgaagtgcaacaacaagaccttcaacggcaccggcccctgcaacaacgtgtccaccgtgcagtgcacccacggcatcaagcccgtgctgtccacccagctgctgctgaacggctccctggccgaggaggagatcatcatccgctccgagaacctgaccgacaacgtgaagaccatcatcgtgcacctgaacgagtccgtggagatcaactgcacccgccccaacaacaacacccgcaagtccatccgcatcggccccggccagtggttctacgccaccggcgacatcatcggcgacatccgccaggcccactgcaacatctccgagatcaagtggaacaagaccctgcagcgcgtgtccgagaagctgcgcgagcacttcaacaagaccatcatcttcaaccagtcctccggcggcgacctggagatcaccacccactccttcaactgcggcggcgagttcttctactgcaacacctccgacctgttcttcaacaagaccttcaacgagacctactccaccggctccaactccaccaactccaacatcaccctgccctgccgcatcaagcagatcatcaacatgtggcaggaggtgggccgctgcatgtacgcctcccccatcgccggcgagatcacctgcaagtccaacatcaccggcctgctgctgacccgcgacggcggcggcaacaactccaccgaggagaccttccgccccggcggcggcaacatgcgcgacaactggcgctccgagctgtacaagtacaaggtggtggaggtgaagcccctgggcatcgcccccaccgagtgccgccgccgcgtggtgcagggcggcggcggctccggcggcggcggctccgccgtggtgggcctgggcgccgtgttcctgggcttcctgggcaccgccggctccaccatgggcgccgcctccatgaccctgaccgtgcaggcccgccagctgctgggctccgccggctccgccggctccggctccgccggctccggctccgccggctccggctccgccggctccaccgtgtggggcatcaagcagctgcaggcccgcgtgctggccatcgagcgctacctgaaggaccagcagctgctgggcatgtggggctgctccggcaagctgatctgctgcaccaacgtgtactggaactcctcctggtccaacaagacctacaacgagatctgggacaacatgacctggatgcagtgggaccgcgagatcgacaactacaccgacaccatctacaagctgctggaggtgtcccagaagcagcaggagaagaacgagcaggacctgctggccctggactcctggaacaacctgtggaactggttcgacatctccaagtggctgtggtacatcaagatcttcatcatgatcgtgggcggcctgatcggcctgcgcatcatcttcgccgtgctgtccctggtgaaccgcgtgcgccagggcatctcccccctgtccttccagaccctgacccccaacccccgcgagctggaccgcctgggcggcatcgaggaggagggcggcgagcaggaccgcgaccgctccatccgcctggtgtccggcttcttctccctggcctggaacgacctgcgctccctgtgcctgttctgctaccaccgcctgcgcgacttcatcctgatcgccggccgcgccgtggagctgctgggccgctcctccctgcagggcctgcagcgcggctgggagatcctgaagtacctgggctccctggtgcagtactggggcctggagctgaagaagtccgccatcaacctgttcgacaccatcgccatcgccgtggccgagggcaccgaccgcatcatcgagttcctgcagcgcatcgtgcgcgccatcctgcacatcccccgccgcatccgccagggcttcgaggccgccgccgcctaataaactagtagtgactgactaggatctggttaccactaaaccagcctcaagaacacccgaatggagtctctaagctacataataccaacttacacttacaaaatgttgtcccccaaaatgtagccattcgtatctgctcctaataaaaagaaagtttcttcacattctaaaaaaaaaaaaaaaaaaaaaaaaaaaaaaaaaaaaaaaaaaaaaaaaaaaaaaaaaaaaaaaaaaaaaaaaaaaaaaaaaaaaaaaaaaaaaaaaaaaaa

SEQ ID NO: 433 - DNA, 2976 bp, synthetic construct
  source 1..2976: mol_type = other DNA
agcataaaagtctcaacacaacatatacaaaacaaacgaatctcaagcaatcaagcattctacttctattgcagcaatttaaatcatttcttttaaagcaaaagcaattttctgaaaattttcaccatttacgaacgatagcgctgccaccatggactccaagggctcctcccagaagggctcccgcctgctgctgctgctggtggtgtccaacctgctgctgccccagggcgtgctggccctgtgggtgaccgtgtactacggcgtgcccgtgtggcgcgaggccaagaccaccctgttctgcgcctccgacgccaagtcctacgagaaggaggtggccaacatctgggccacccacgcctgcgtgcccaccgaccccaacccccaggagctggtgctgaagaacgtgaccgagaacttcaacatgtggaagaacgacatggtggaccagatgcacgaggacatcatctccctgtgggaccagtccctgaagccctgcgtgaagctgacccccctgtgcgtgaccctgcactgctccacctacaacaacacccacaacatctccaaggagatcaagaactgctccttcaacgccaccaccgagctgcgcgacaagcgccgcaaggagtacgccctgttctaccgcctggacatcgtgcccctgaacaagaacggccgccagtaccgcctgatcaactgcaacacctccgtgtgcacccaggtgtgccccaagctgaccttcgaccccatccccatccactactgcgcccccgccggctacgccatcctgaagtgcaacaacaagaccttcaacggcaccggcccctgcaacaacgtgtccaccgtgcagtgcacccacggcatcaagcccgtgctgtccacccagctgctgctgaacggctccctggccgaggaggagatcatcatccgctccgagaacctgaccgacaacgtgaagaccatcatcgtgcacctgaacgagtccgtggagatcaactgcacccgccccaacaacatgacccgcaagtccatccgcatcggccccggccagtggttctacgccctgggcgacatcatcggcgacatccgccagccccactgcaacatctccgagatcaagtggaacaagaccctgcagcgcgtgtccgagaagctgcgcgagcacttcaacaagaccatcatcttcaaccagtcctccggcggcgacctggagatcaccacccactccttcaactgcggcggcgagttcttctactgcaacacctccgacctgttcttcaacaagaccttcaacgagacctactccaccggctccaactccaccaactccaacatcaccctgccctgccgcatcaagcagatcatcaacatgtggcaggaggtgggccgctgcatgtacgccccccccatcgccggcaacatcacctgcaagtccaacatcaccggcctgctgctgacccgcgacggcggcggcaacaactccaccgaggagaccttccgccccggcggcggcaacatgcgcgacaactggcgctccgagctgtacaagtacaaggtggtggaggtgaagcccctgggcatcgcccccaccgagtgccgccgccgcgtggtgcagggcggcggcggctccggcggcggcggctccgccgtggtgggcctgggcgccgtgttcctgggcttcctgggcaccgccggctccaccatgggcgccgcctccatgaccctgaccgtgcaggcccgccagctgctgggctccgccggctccgccggctccggctccgccggctccggctccgccggctccggctccgccggctccaccgtgtggggcttcaagcagctgcaggcccgcgtgctggccatcgagcgctacctggaggtgcagcagctgctgggcatgtggggctgctccggcaagctgatctgctgcaccaacgtgccctggaactcctcctggtccaacaagacctacaacgagatctgggacaacatgacctggatgcagtgggaccgcgagatcggcaactacaccgacaccatctacaagctgctggaggtgtcccagttccagcaggagaagaacgagcaggacctgctggccctggactcctggaacaacctgtggaactggttcgacatctccaagtggctgtggtacatcaagatcttcatcatgatcgtgggcggcctgatcggcctgcgcatcatcttcgccgtgctgtccctggtgaaccgcgtgcgccagggcatctcccccctgtccttccagaccctgacccccaacccccgcgagctggaccgcctgggcggcatcgaggaggagggcggcgagcaggaccgcgaccgctccatccgcctggtgtccggcttcttctccctggcctggaacgacctgcgctccctgtgcctgttctgctaccaccgcctgcgcgacttcatcctgatcgccggccgcgccgtggagctgctgggccgctcctccctgcagggcctgcagcgcggctgggagatcctgaagtacctgggctccctggtgcagtactggggcctggagctgaagaagtccgccatcaacctgttcgacaccatcgccatcgccgtggccgagggcaccgaccgcatcatcgagttcctgcagcgcatcgtgcgcgccatcctgcacatcccccgccgcatccgccagggcttcgaggccgccgccgcctaataaactagtagtgactgactaggatctggttaccactaaaccagcctcaagaacacccgaatggagtctctaagctacataataccaacttacacttacaaaatgttgtcccccaaaatgtagccattcgtatctgctcctaataaaaagaaagtttcttcacattctaaaaaaaaaaaaaaaaaaaaaaaaaaaaaaaaaaaaaaaaaaaaaaaaaaaaaaaaaaaaaaaaaaaaaaaaaaaaaaaaaaaaaaaaaaaaaaaaaaaaa

SEQ ID NO: 434 - DNA, 2523 bp, synthetic construct
  source 1..2523: mol_type = other DNA
agcataaaagtctcaacacaacatatacaaaacaaacgaatctcaagcaatcaagcattctacttctattgcagcaatttaaatcatttcttttaaagcaaaagcaattttctgaaaattttcaccatttacgaacgatagcgctgccaccatggactccaagggctcctcccagaagggctcccgcctgctgctgctgctggtggtgtccaacctgctgctgccccagggcgtgctggccctgtgggtgaccgtgtactacggcgtgcccgtgtggcgcgaggccaagaccaccctgttctgcgcctccgacgccaagtcctacgagaaggaggtgcacaacatctgggccacccacgcctgcgtgcccaccgaccccaacccccaggagctggtgctgaagaacgtgaccgagaacttcaacatgtggaagaacgacatggtggaccagatgcacgaggacatcatctccctgtgggaccagtccctgaagccctgcgtgaagctgacccccctgtgcgtgaccctgcactgctccacctacaacaacacccacaacatctccaaggagatcaagaactgctccttcaacgccaccaccgagctgcgcgacaagcgccgcaaggagtacgccctgttctaccgcctggacatcgtgcccctgaacaagaacggccgccagtaccgcctgatcaactgcaacacctccgtgtgcacccaggtgtgccccaagctgaccttcgaccccatccccatccactactgcgcccccgccggctacgccatcctgaagtgcaacaacaagaccttcaacggcaccggcccctgcaacaacgtgtccaccgtgcagtgcacccacggcatcaagcccgtgctgtccacccagctgctgctgaacggctccctggccgaggaggagatcatcatccgctccgagaacctgaccgacaacgtgaagaccatcatcgtgcacctgaacgagtccgtggagatcaactgcacccgccccaacaacaacacccgcaagtccatccgcatcggccccggccagaccttctacgccaccggcgacatcatcggcgacatccgccaggcccactgcaacatctccgagatcaagtggaacaagaccctgcagcgcgtgtccgagaagctgcgcgagcacttcaacaagaccatcatcttcaaccagtcctccggcggcgacctggagatcaccacccactccttcaactgcggcggcgagttcttctactgcaacacctccgacctgttcttcaacaagaccttcaacgagacctactccaccggctccaactccaccaactccaacatcaccctgccctgccgcatcaagcagatcatcaacatgtggcaggaggtgggccgctgcatgtacgcctcccccatcgccggcgagatcacctgcaagtccaacatcaccggcctgctgctgacccgcgacggcggcggcaacaactccaccgaggagaccttccgccccggcggcggcaacatgcgcgacaactggcgctccgagctgtacaagtacaaggtggtggaggtgaagcccctgggcatcgcccccaccgagtgccgccgccgcgtggtgcagggcggcggcggctccggcggcggcggctccgccgtggtgggcctgggcgccgtgttcctgggcttcctgggcaccgccggctccaccatgggcgccgcctccatgaccctgaccgtgcaggcccgccagctgctgggctccgccggctccgccggctccggctccgccggctccggctccgccggctccggctccgccggctccaccgtgtggggcatcaagcagctgcaggcccgcgtgctggccatcgagcgctacctgaaggaccagcagctgctgggcatgtggggctgctccggcaagctgatctgctgcaccaacgtgtactggaactcctcctggtccaacaagacctacaacgagatctgggacaacatgacctggatgcagtgggaccgcgagatcgacaactacaccgacaccatctacaagctgctggaggtgtcccagaagcagcaggagtccaacgagaaggacctgctggccctggactcctggaacaacctgtggaactggttcgacatctccaagtggctgtggtacatcaagatcttcatcatgatcgtgggcggcctgatcggcctgcgcatcatcttcgccgtgctgtccctggtgaaccgcgtgcgccagggcatctaataaactagtagtgactgactaggatctggttaccactaaaccagcctcaagaacacccgaatggagtctctaagctacataataccaacttacacttacaaaatgttgtcccccaaaatgtagccattcgtatctgctcctaataaaaagaaagtttcttcacattctaaaaaaaaaaaaaaaaaaaaaaaaaaaaaaaaaaaaaaaaaaaaaaaaaaaaaaaaaaaaaaaaaaaaaaaaaaaaaaaaaaaaaaaaaaaaaaaaaaaaa

SEQ ID NO: 435 - DNA, 2523 bp, synthetic construct
  source 1..2523: mol_type = other DNA
agcataaaagtctcaacacaacatatacaaaacaaacgaatctcaagcaatcaagcattctacttctattgcagcaatttaaatcatttcttttaaagcaaaagcaattttctgaaaattttcaccatttacgaacgatagcgctgccaccatggactccaagggctcctcccagaagggctcccgcctgctgctgctgctggtggtgtccaacctgctgctgccccagggcgtgctggccctgtgggtgaccgtgtactacggcgtgcccgtgtggcgcgaggccaagaccaccctgttctgcgcctccgacgccaagtcctacgagaaggaggtgcacaacatctgggccacccacgcctgcgtgcccaccgaccccaacccccaggagctggtgctgaagaacgtgaccgagaacttcaacatgtggaagaacgacatggtggaccagatgcacgaggacatcatctccctgtgggaccagtccctgaagccctgcgtgaagctgacccccctgtgcgtgaccctgcactgctccacctacaacaacacccacaacatctccaaggagatcaagaactgctccttcaacgccaccaccgagctgcgcgacaagcgccgcaaggagtacgccctgttctaccgcctggacatcgtgcccctgaacaagaacggccgccagtaccgcctgatcaactgcaacacctccgtgtgcacccaggtgtgccccaagctgaccttcgaccccatccccatccactactgcgcccccgccggctacgccatcctgaagtgcaacaacaagaccttcaacggcaccggcccctgcaacaacgtgtccaccgtgcagtgcacccacggcatcaagcccgtgctgtccacccagctgctgctgaacggctccctggccgaggaggagatcatcatccgctccgagaacctgaccgacaacgtgaagaccatcatcgtgcacctgaacgagtccgtggagatcaactgcacccgccccaacaacaacatgcgcaagtccatccgcatcggccccggccagaccttctacgccctgggcgacatcatcggcgacatccgccagccccactgcaacatctccgagatcaagtggaacaagaccctgcagcgcgtgtccgagaagctgcgcgagcacttcaacaagaccatcatcttcaaccagtcctccggcggcgacctggagatcaccacccactccttcaactgcggcggcgagttcttctactgcaacacctccgacctgttcttcaacaagaccttcaacgagacctactccaccggctccaactccaccaactccaacatcaccctgccctgccgcatcaagcagatcatcaacatgtggcaggaggtgggccgctgcatgtacgccccccccatcgccggcaacatcacctgcaagtccaacatcaccggcctgctgctgacccgcgacggcggcggcaacaactccaccgaggagaccttccgccccggcggcggcaacatgcgcgacaactggcgctccgagctgtacaagtacaaggtggtggaggtgaagcccctgggcatcgcccccaccgagtgccgccgccgcgtggtgcagggcggcggcggctccggcggcggcggctccgccgtggtgggcctgggcgccgtgttcctgggcttcctgggcaccgccggctccaccatgggcgccgcctccatgaccctgaccgtgcaggcccgccagctgctgggctccgccggctccgccggctccggctccgccggctccggctccgccggctccggctccgccggctccaccgtgtggggcttcaagcagctgcaggcccgcgtgctggccatcgagcgctacctggaggtgcagcagctgctgggcatgtggggctgctccggcaagctgatctgctgcaccaacgtgccctggaactcctcctggtccaacaagacctacaacgagatctgggacaacatgacctggatgcagtgggaccgcgagatcggcaactacaccgacaccatctacaagctgctggaggtgtcccagttccagcaggagatcaacgagaaggacctgctggccctggactcctggaacaacctgtggaactggttcgacatctccaagtggctgtggtacatcaagatcttcatcatgatcgtgggcggcctgatcggcctgcgcatcatcttcgccgtgctgtccctggtgaaccgcgtgcgccagggcatctaataaactagtagtgactgactaggatctggttaccactaaaccagcctcaagaacacccgaatggagtctctaagctacataataccaacttacacttacaaaatgttgtcccccaaaatgtagccattcgtatctgctcctaataaaaagaaagtttcttcacattctaaaaaaaaaaaaaaaaaaaaaaaaaaaaaaaaaaaaaaaaaaaaaaaaaaaaaaaaaaaaaaaaaaaaaaaaaaaaaaaaaaaaaaaaaaaaaaaaaaaaa

SEQ ID NO: 436 - DNA, 2523 bp, synthetic construct
  source 1..2523: mol_type = other DNA
agcataaaagtctcaacacaacatatacaaaacaaacgaatctcaagcaatcaagcattctacttctattgcagcaatttaaatcatttcttttaaagcaaaagcaattttctgaaaattttcaccatttacgaacgatagcgctgccaccatggactccaagggctcctcccagaagggctcccgcctgctgctgctgctggtggtgtccaacctgctgctgccccagggcgtgctggccctgtgggtgaccgtgtactacggcgtgcccgtgtggcgcgaggccaagaccaccctgttctgcgcctccgacgccaagtcctacgagaaggaggtggccaacatctgggccacccacgcctgcgtgcccaccgaccccaacccccaggagctggtgctgaagaacgtgaccgagaacttcaacatgtggaagaacgacatggtggaccagatgcacgaggacatcatctccctgtgggaccagtccctgaagccctgcgtgaagctgacccccctgtgcgtgaccctgcactgctccacctacaacaacacccacaacatctccaaggagatcaagaactgctccttcaacgccaccaccgagctgcgcgacaagcgccgcaaggagtacgccctgttctaccgcctggacatcgtgcccctgaacaagaacggccgccagtaccgcctgatcaactgcaacacctccgtgtgcacccaggtgtgccccaagctgaccttcgaccccatccccatccactactgcgcccccgccggctacgccatcctgaagtgcaacaacaagaccttcaacggcaccggcccctgcaacaacgtgtccaccgtgcagtgcacccacggcatcaagcccgtgctgtccacccagctgctgctgaacggctccctggccgaggaggagatcatcatccgctccgagaacctgaccgacaacgtgaagaccatcatcgtgcacctgaacgagtccgtggagatcaactgcacccgccccaacaacaacacccgcaagtccatccgcatcggccccggccagtggttctacgccaccggcgacatcatcggcgacatccgccaggcccactgcaacatctccgagatcaagtggaacaagaccctgcagcgcgtgtccgagaagctgcgcgagcacttcaacaagaccatcatcttcaaccagtcctccggcggcgacctggagatcaccacccactccttcaactgcggcggcgagttcttctactgcaacacctccgacctgttcttcaacaagaccttcaacgagacctactccaccggctccaactccaccaactccaacatcaccctgccctgccgcatcaagcagatcatcaacatgtggcaggaggtgggccgctgcatgtacgcctcccccatcgccggcgagatcacctgcaagtccaacatcaccggcctgctgctgacccgcgacggcggcggcaacaactccaccgaggagaccttccgccccggcggcggcaacatgcgcgacaactggcgctccgagctgtacaagtacaaggtggtggaggtgaagcccctgggcatcgcccccaccgagtgccgccgccgcgtggtgcagggcggcggcggctccggcggcggcggctccgccgtggtgggcctgggcgccgtgttcctgggcttcctgggcaccgccggctccaccatgggcgccgcctccatgaccctgaccgtgcaggcccgccagctgctgggctccgccggctccgccggctccggctccgccggctccggctccgccggctccggctccgccggctccaccgtgtggggcatcaagcagctgcaggcccgcgtgctggccatcgagcgctacctgaaggaccagcagctgctgggcatgtggggctgctccggcaagctgatctgctgcaccaacgtgtactggaactcctcctggtccaacaagacctacaacgagatctgggacaacatgacctggatgcagtgggaccgcgagatcgacaactacaccgacaccatctacaagctgctggaggtgtcccagaagcagcaggagaagaacgagcaggacctgctggccctggactcctggaacaacctgtggaactggttcgacatctccaagtggctgtggtacatcaagatcttcatcatgatcgtgggcggcctgatcggcctgcgcatcatcttcgccgtgctgtccctggtgaaccgcgtgcgccagggcatctaataaactagtagtgactgactaggatctggttaccactaaaccagcctcaagaacacccgaatggagtctctaagctacataataccaacttacacttacaaaatgttgtcccccaaaatgtagccattcgtatctgctcctaataaaaagaaagtttcttcacattctaaaaaaaaaaaaaaaaaaaaaaaaaaaaaaaaaaaaaaaaaaaaaaaaaaaaaaaaaaaaaaaaaaaaaaaaaaaaaaaaaaaaaaaaaaaaaaaaaaaaa

SEQ ID NO: 437 - DNA, 2523 bp, synthetic construct
  source 1..2523: mol_type = other DNA
agcataaaagtctcaacacaacatatacaaaacaaacgaatctcaagcaatcaagcattctacttctattgcagcaatttaaatcatttcttttaaagcaaaagcaattttctgaaaattttcaccatttacgaacgatagcgctgccaccatggactccaagggctcctcccagaagggctcccgcctgctgctgctgctggtggtgtccaacctgctgctgccccagggcgtgctggccctgtgggtgaccgtgtactacggcgtgcccgtgtggcgcgaggccaagaccaccctgttctgcgcctccgacgccaagtcctacgagaaggaggtggccaacatctgggccacccacgcctgcgtgcccaccgaccccaacccccaggagctggtgctgaagaacgtgaccgagaacttcaacatgtggaagaacgacatggtggaccagatgcacgaggacatcatctccctgtgggaccagtccctgaagccctgcgtgaagctgacccccctgtgcgtgaccctgcactgctccacctacaacaacacccacaacatctccaaggagatcaagaactgctccttcaacgccaccaccgagctgcgcgacaagcgccgcaaggagtacgccctgttctaccgcctggacatcgtgcccctgaacaagaacggccgccagtaccgcctgatcaactgcaacacctccgtgtgcacccaggtgtgccccaagctgaccttcgaccccatccccatccactactgcgcccccgccggctacgccatcctgaagtgcaacaacaagaccttcaacggcaccggcccctgcaacaacgtgtccaccgtgcagtgcacccacggcatcaagcccgtgctgtccacccagctgctgctgaacggctccctggccgaggaggagatcatcatccgctccgagaacctgaccgacaacgtgaagaccatcatcgtgcacctgaacgagtccgtggagatcaactgcacccgccccaacaacatgacccgcaagtccatccgcatcggccccggccagtggttctacgccctgggcgacatcatcggcgacatccgccagccccactgcaacatctccgagatcaagtggaacaagaccctgcagcgcgtgtccgagaagctgcgcgagcacttcaacaagaccatcatcttcaaccagtcctccggcggcgacctggagatcaccacccactccttcaactgcggcggcgagttcttctactgcaacacctccgacctgttcttcaacaagaccttcaacgagacctactccaccggctccaactccaccaactccaacatcaccctgccctgccgcatcaagcagatcatcaacatgtggcaggaggtgggccgctgcatgtacgccccccccatcgccggcaacatcacctgcaagtccaacatcaccggcctgctgctgacccgcgacggcggcggcaacaactccaccgaggagaccttccgccccggcggcggcaacatgcgcgacaactggcgctccgagctgtacaagtacaaggtggtggaggtgaagcccctgggcatcgcccccaccgagtgccgccgccgcgtggtgcagggcggcggcggctccggcggcggcggctccgccgtggtgggcctgggcgccgtgttcctgggcttcctgggcaccgccggctccaccatgggcgccgcctccatgaccctgaccgtgcaggcccgccagctgctgggctccgccggctccgccggctccggctccgccggctccggctccgccggctccggctccgccggctccaccgtgtggggcttcaagcagctgcaggcccgcgtgctggccatcgagcgctacctggaggtgcagcagctgctgggcatgtggggctgctccggcaagctgatctgctgcaccaacgtgccctggaactcctcctggtccaacaagacctacaacgagatctgggacaacatgacctggatgcagtgggaccgcgagatcggcaactacaccgacaccatctacaagctgctggaggtgtcccagttccagcaggagaagaacgagcaggacctgctggccctggactcctggaacaacctgtggaactggttcgacatctccaagtggctgtggtacatcaagatcttcatcatgatcgtgggcggcctgatcggcctgcgcatcatcttcgccgtgctgtccctggtgaaccgcgtgcgccagggcatctaataaactagtagtgactgactaggatctggttaccactaaaccagcctcaagaacacccgaatggagtctctaagctacataataccaacttacacttacaaaatgttgtcccccaaaatgtagccattcgtatctgctcctaataaaaagaaagtttcttcacattctaaaaaaaaaaaaaaaaaaaaaaaaaaaaaaaaaaaaaaaaaaaaaaaaaaaaaaaaaaaaaaaaaaaaaaaaaaaaaaaaaaaaaaaaaaaaaaaaaaaaa

SEQ ID NO: 438 - DNA, 2652 bp, synthetic construct
  source 1..2652: mol_type = other DNA
agcataaaagtctcaacacaacatatacaaaacaaacgaatctcaagcaatcaagcattctacttctattgcagcaatttaaatcatttcttttaaagcaaaagcaattttctgaaaattttcaccatttacgaacgatagcgctgccaccatggactccaagggctcctcccagaagggctcccgcctgctgctgctgctggtggtgtccaacctgctgctgccccagggcgtgctggccctgtgggtgaccgtgtactacggcgtgcccgtgtggcgcgaggccaagaccaccctgttctgcgcctccgacgccaagtcctacgagaaggaggtgcacaacatctgggccacccacgcctgcgtgcccaccgaccccaacccccaggagctggtgctgaagaacgtgaccgagaacttcaacatgtggaagaacgacatggtggaccagatgcacgaggacatcatctccctgtgggaccagtccctgaagccctgcgtgaagctgacccccctgtgcgtgaccctgcactgctccacctacaacaacacccacaacatctccaaggagatcaagaactgctccttcaacgccaccaccgagctgcgcgacaagcgccgcaaggagtacgccctgttctaccgcctggacatcgtgcccctgaacaagaacggccgccagtaccgcctgatcaactgcaacacctccgtgtgcacccaggtgtgccccaagctgaccttcgaccccatccccatccactactgcgcccccgccggctacgccatcctgaagtgcaacaacaagaccttcaacggcaccggcccctgcaacaacgtgtccaccgtgcagtgcacccacggcatcaagcccgtgctgtccacccagctgctgctgaacggctccctggccgaggaggagatcatcatccgctccgagaacctgaccgacaacgtgaagaccatcatcgtgcacctgaacgagtccgtggagatcaactgcacccgccccaacaacaacacccgcaagtccatccgcatcggccccggccagaccttctacgccaccggcgacatcatcggcgacatccgccaggcccactgcaacatctccgagatcaagtggaacaagaccctgcagcgcgtgtccgagaagctgcgcgagcacttcaacaagaccatcatcttcaaccagtcctccggcggcgacctggagatcaccacccactccttcaactgcggcggcgagttcttctactgcaacacctccgacctgttcttcaacaagaccttcaacgagacctactccaccggctccaactccaccaactccaacatcaccctgccctgccgcatcaagcagatcatcaacatgtggcaggaggtgggccgctgcatgtacgcctcccccatcgccggcgagatcacctgcaagtccaacatcaccggcctgctgctgacccgcgacggcggcggcaacaactccaccgaggagaccttccgccccggcggcggcaacatgcgcgacaactggcgctccgagctgtacaagtacaaggtggtggaggtgaagcccctgggcatcgcccccaccgagtgccgccgccgcgtggtgcagggcggcggcggctccggcggcggcggctccgccgtggtgggcctgggcgccgtgttcctgggcttcctgggcaccgccggctccaccatgggcgccgcctccatgaccctgaccgtgcaggcccgccagctgctgggctccgccggctccgccggctccggctccgccggctccggctccgccggctccggctccgccggctccaccgtgtggggcatcaagcagctgcaggcccgcgtgctggccatcgagcgctacctgaaggaccagcagctgctgggcatgtggggctgctccggcaagctgatctgctgcaccaacgtgtactggaactcctcctggtccaacaagacctacaacgagatctgggacaacatgacctggatgcagtgggaccgcgagatcgacaactacaccgacaccatctacaagctgctggaggtgtcccagaagcagcaggagtccaacgagaaggacctgctggccctggactcctggaacaacctgtggaactggttcgacatctccaagtggctgtggtacatcaagatcttcatcatgatcgtgggcggcctgatcggcctgcgcatcatcttcgccgtgctgtccctggtgaaccgcgtgcgccagggcatctcccccctgtccttccagaccctgacccccaacccccgcgagctggaccgcctgggcggcatcgaggaggagggcggcgagcaggaccgcgaccgctccatccgcctggtgtccggcttcttctccctgtaataaactagtagtgactgactaggatctggttaccactaaaccagcctcaagaacacccgaatggagtctctaagctacataataccaacttacacttacaaaatgttgtcccccaaaatgtagccattcgtatctgctcctaataaaaagaaagtttcttcacattctaaaaaaaaaaaaaaaaaaaaaaaaaaaaaaaaaaaaaaaaaaaaaaaaaaaaaaaaaaaaaaaaaaaaaaaaaaaaaaaaaaaaaaaaaaaaaaaaaaaaa

SEQ ID NO: 439 - DNA, 2652 bp, synthetic construct
  source 1..2652: mol_type = other DNA
agcataaaagtctcaacacaacatatacaaaacaaacgaatctcaagcaatcaagcattctacttctattgcagcaatttaaatcatttcttttaaagcaaaagcaattttctgaaaattttcaccatttacgaacgatagcgctgccaccatggactccaagggctcctcccagaagggctcccgcctgctgctgctgctggtggtgtccaacctgctgctgccccagggcgtgctggccctgtgggtgaccgtgtactacggcgtgcccgtgtggcgcgaggccaagaccaccctgttctgcgcctccgacgccaagtcctacgagaaggaggtgcacaacatctgggccacccacgcctgcgtgcccaccgaccccaacccccaggagctggtgctgaagaacgtgaccgagaacttcaacatgtggaagaacgacatggtggaccagatgcacgaggacatcatctccctgtgggaccagtccctgaagccctgcgtgaagctgacccccctgtgcgtgaccctgcactgctccacctacaacaacacccacaacatctccaaggagatcaagaactgctccttcaacgccaccaccgagctgcgcgacaagcgccgcaaggagtacgccctgttctaccgcctggacatcgtgcccctgaacaagaacggccgccagtaccgcctgatcaactgcaacacctccgtgtgcacccaggtgtgccccaagctgaccttcgaccccatccccatccactactgcgcccccgccggctacgccatcctgaagtgcaacaacaagaccttcaacggcaccggcccctgcaacaacgtgtccaccgtgcagtgcacccacggcatcaagcccgtgctgtccacccagctgctgctgaacggctccctggccgaggaggagatcatcatccgctccgagaacctgaccgacaacgtgaagaccatcatcgtgcacctgaacgagtccgtggagatcaactgcacccgccccaacaacaacatgcgcaagtccatccgcatcggccccggccagaccttctacgccctgggcgacatcatcggcgacatccgccagccccactgcaacatctccgagatcaagtggaacaagaccctgcagcgcgtgtccgagaagctgcgcgagcacttcaacaagaccatcatcttcaaccagtcctccggcggcgacctggagatcaccacccactccttcaactgcggcggcgagttcttctactgcaacacctccgacctgttcttcaacaagaccttcaacgagacctactccaccggctccaactccaccaactccaacatcaccctgccctgccgcatcaagcagatcatcaacatgtggcaggaggtgggccgctgcatgtacgccccccccatcgccggcaacatcacctgcaagtccaacatcaccggcctgctgctgacccgcgacggcggcggcaacaactccaccgaggagaccttccgccccggcggcggcaacatgcgcgacaactggcgctccgagctgtacaagtacaaggtggtggaggtgaagcccctgggcatcgcccccaccgagtgccgccgccgcgtggtgcagggcggcggcggctccggcggcggcggctccgccgtggtgggcctgggcgccgtgttcctgggcttcctgggcaccgccggctccaccatgggcgccgcctccatgaccctgaccgtgcaggcccgccagctgctgggctccgccggctccgccggctccggctccgccggctccggctccgccggctccggctccgccggctccaccgtgtggggcttcaagcagctgcaggcccgcgtgctggccatcgagcgctacctggaggtgcagcagctgctgggcatgtggggctgctccggcaagctgatctgctgcaccaacgtgccctggaactcctcctggtccaacaagacctacaacgagatctgggacaacatgacctggatgcagtgggaccgcgagatcggcaactacaccgacaccatctacaagctgctggaggtgtcccagttccagcaggagatcaacgagaaggacctgctggccctggactcctggaacaacctgtggaactggttcgacatctccaagtggctgtggtacatcaagatcttcatcatgatcgtgggcggcctgatcggcctgcgcatcatcttcgccgtgctgtccctggtgaaccgcgtgcgccagggcatctcccccctgtccttccagaccctgacccccaacccccgcgagctggaccgcctgggcggcatcgaggaggagggcggcgagcaggaccgcgaccgctccatccgcctggtgtccggcttcttctccctgtaataaactagtagtgactgactaggatctggttaccactaaaccagcctcaagaacacccgaatggagtctctaagctacataataccaacttacacttacaaaatgttgtcccccaaaatgtagccattcgtatctgctcctaataaaaagaaagtttcttcacattctaaaaaaaaaaaaaaaaaaaaaaaaaaaaaaaaaaaaaaaaaaaaaaaaaaaaaaaaaaaaaaaaaaaaaaaaaaaaaaaaaaaaaaaaaaaaaaaaaaaaa

SEQ ID NO: 440 - DNA, 2652 bp, synthetic construct
  source 1..2652: mol_type = other DNA
agcataaaagtctcaacacaacatatacaaaacaaacgaatctcaagcaatcaagcattctacttctattgcagcaatttaaatcatttcttttaaagcaaaagcaattttctgaaaattttcaccatttacgaacgatagcgctgccaccatggactccaagggctcctcccagaagggctcccgcctgctgctgctgctggtggtgtccaacctgctgctgccccagggcgtgctggccctgtgggtgaccgtgtactacggcgtgcccgtgtggcgcgaggccaagaccaccctgttctgcgcctccgacgccaagtcctacgagaaggaggtggccaacatctgggccacccacgcctgcgtgcccaccgaccccaacccccaggagctggtgctgaagaacgtgaccgagaacttcaacatgtggaagaacgacatggtggaccagatgcacgaggacatcatctccctgtgggaccagtccctgaagccctgcgtgaagctgacccccctgtgcgtgaccctgcactgctccacctacaacaacacccacaacatctccaaggagatcaagaactgctccttcaacgccaccaccgagctgcgcgacaagcgccgcaaggagtacgccctgttctaccgcctggacatcgtgcccctgaacaagaacggccgccagtaccgcctgatcaactgcaacacctccgtgtgcacccaggtgtgccccaagctgaccttcgaccccatccccatccactactgcgcccccgccggctacgccatcctgaagtgcaacaacaagaccttcaacggcaccggcccctgcaacaacgtgtccaccgtgcagtgcacccacggcatcaagcccgtgctgtccacccagctgctgctgaacggctccctggccgaggaggagatcatcatccgctccgagaacctgaccgacaacgtgaagaccatcatcgtgcacctgaacgagtccgtggagatcaactgcacccgccccaacaacaacacccgcaagtccatccgcatcggccccggccagtggttctacgccaccggcgacatcatcggcgacatccgccaggcccactgcaacatctccgagatcaagtggaacaagaccctgcagcgcgtgtccgagaagctgcgcgagcacttcaacaagaccatcatcttcaaccagtcctccggcggcgacctggagatcaccacccactccttcaactgcggcggcgagttcttctactgcaacacctccgacctgttcttcaacaagaccttcaacgagacctactccaccggctccaactccaccaactccaacatcaccctgccctgccgcatcaagcagatcatcaacatgtggcaggaggtgggccgctgcatgtacgcctcccccatcgccggcgagatcacctgcaagtccaacatcaccggcctgctgctgacccgcgacggcggcggcaacaactccaccgaggagaccttccgccccggcggcggcaacatgcgcgacaactggcgctccgagctgtacaagtacaaggtggtggaggtgaagcccctgggcatcgcccccaccgagtgccgccgccgcgtggtgcagggcggcggcggctccggcggcggcggctccgccgtggtgggcctgggcgccgtgttcctgggcttcctgggcaccgccggctccaccatgggcgccgcctccatgaccctgaccgtgcaggcccgccagctgctgggctccgccggctccgccggctccggctccgccggctccggctccgccggctccggctccgccggctccaccgtgtggggcatcaagcagctgcaggcccgcgtgctggccatcgagcgctacctgaaggaccagcagctgctgggcatgtggggctgctccggcaagctgatctgctgcaccaacgtgtactggaactcctcctggtccaacaagacctacaacgagatctgggacaacatgacctggatgcagtgggaccgcgagatcgacaactacaccgacaccatctacaagctgctggaggtgtcccagaagcagcaggagaagaacgagcaggacctgctggccctggactcctggaacaacctgtggaactggttcgacatctccaagtggctgtggtacatcaagatcttcatcatgatcgtgggcggcctgatcggcctgcgcatcatcttcgccgtgctgtccctggtgaaccgcgtgcgccagggcatctcccccctgtccttccagaccctgacccccaacccccgcgagctggaccgcctgggcggcatcgaggaggagggcggcgagcaggaccgcgaccgctccatccgcctggtgtccggcttcttctccctgtaataaactagtagtgactgactaggatctggttaccactaaaccagcctcaagaacacccgaatggagtctctaagctacataataccaacttacacttacaaaatgttgtcccccaaaatgtagccattcgtatctgctcctaataaaaagaaagtttcttcacattctaaaaaaaaaaaaaaaaaaaaaaaaaaaaaaaaaaaaaaaaaaaaaaaaaaaaaaaaaaaaaaaaaaaaaaaaaaaaaaaaaaaaaaaaaaaaaaaaaaaaa

SEQ ID NO: 441 - DNA, 2652 bp, synthetic construct
  source 1..2652: mol_type = other DNA
agcataaaagtctcaacacaacatatacaaaacaaacgaatctcaagcaatcaagcattctacttctattgcagcaatttaaatcatttcttttaaagcaaaagcaattttctgaaaattttcaccatttacgaacgatagcgctgccaccatggactccaagggctcctcccagaagggctcccgcctgctgctgctgctggtggtgtccaacctgctgctgccccagggcgtgctggccctgtgggtgaccgtgtactacggcgtgcccgtgtggcgcgaggccaagaccaccctgttctgcgcctccgacgccaagtcctacgagaaggaggtggccaacatctgggccacccacgcctgcgtgcccaccgaccccaacccccaggagctggtgctgaagaacgtgaccgagaacttcaacatgtggaagaacgacatggtggaccagatgcacgaggacatcatctccctgtgggaccagtccctgaagccctgcgtgaagctgacccccctgtgcgtgaccctgcactgctccacctacaacaacacccacaacatctccaaggagatcaagaactgctccttcaacgccaccaccgagctgcgcgacaagcgccgcaaggagtacgccctgttctaccgcctggacatcgtgcccctgaacaagaacggccgccagtaccgcctgatcaactgcaacacctccgtgtgcacccaggtgtgccccaagctgaccttcgaccccatccccatccactactgcgcccccgccggctacgccatcctgaagtgcaacaacaagaccttcaacggcaccggcccctgcaacaacgtgtccaccgtgcagtgcacccacggcatcaagcccgtgctgtccacccagctgctgctgaacggctccctggccgaggaggagatcatcatccgctccgagaacctgaccgacaacgtgaagaccatcatcgtgcacctgaacgagtccgtggagatcaactgcacccgccccaacaacatgacccgcaagtccatccgcatcggccccggccagtggttctacgccctgggcgacatcatcggcgacatccgccagccccactgcaacatctccgagatcaagtggaacaagaccctgcagcgcgtgtccgagaagctgcgcgagcacttcaacaagaccatcatcttcaaccagtcctccggcggcgacctggagatcaccacccactccttcaactgcggcggcgagttcttctactgcaacacctccgacctgttcttcaacaagaccttcaacgagacctactccaccggctccaactccaccaactccaacatcaccctgccctgccgcatcaagcagatcatcaacatgtggcaggaggtgggccgctgcatgtacgccccccccatcgccggcaacatcacctgcaagtccaacatcaccggcctgctgctgacccgcgacggcggcggcaacaactccaccgaggagaccttccgccccggcggcggcaacatgcgcgacaactggcgctccgagctgtacaagtacaaggtggtggaggtgaagcccctgggcatcgcccccaccgagtgccgccgccgcgtggtgcagggcggcggcggctccggcggcggcggctccgccgtggtgggcctgggcgccgtgttcctgggcttcctgggcaccgccggctccaccatgggcgccgcctccatgaccctgaccgtgcaggcccgccagctgctgggctccgccggctccgccggctccggctccgccggctccggctccgccggctccggctccgccggctccaccgtgtggggcttcaagcagctgcaggcccgcgtgctggccatcgagcgctacctggaggtgcagcagctgctgggcatgtggggctgctccggcaagctgatctgctgcaccaacgtgccctggaactcctcctggtccaacaagacctacaacgagatctgggacaacatgacctggatgcagtgggaccgcgagatcggcaactacaccgacaccatctacaagctgctggaggtgtcccagttccagcaggagaagaacgagcaggacctgctggccctggactcctggaacaacctgtggaactggttcgacatctccaagtggctgtggtacatcaagatcttcatcatgatcgtgggcggcctgatcggcctgcgcatcatcttcgccgtgctgtccctggtgaaccgcgtgcgccagggcatctcccccctgtccttccagaccctgacccccaacccccgcgagctggaccgcctgggcggcatcgaggaggagggcggcgagcaggaccgcgaccgctccatccgcctggtgtccggcttcttctccctgtaataaactagtagtgactgactaggatctggttaccactaaaccagcctcaagaacacccgaatggagtctctaagctacataataccaacttacacttacaaaatgttgtcccccaaaatgtagccattcgtatctgctcctaataaaaagaaagtttcttcacattctaaaaaaaaaaaaaaaaaaaaaaaaaaaaaaaaaaaaaaaaaaaaaaaaaaaaaaaaaaaaaaaaaaaaaaaaaaaaaaaaaaaaaaaaaaaaaaaaaaaaa

SEQ ID NO: 442 - DNA, 2637 bp, synthetic construct
  source 1..2637: mol_type = other DNA
agcataaaagtctcaacacaacatatacaaaacaaacgaatctcaagcaatcaagcattctacttctattgcagcaatttaaatcatttcttttaaagcaaaagcaattttctgaaaattttcaccatttacgaacgatagcgctgccaccatggactccaagggctcctcccagaagggctcccgcctgctgctgctgctggtggtgtccaacctgctgctgccccagggcgtgctggccctgtgggtgaccgtgtactacggcgtgcccgtgtggcgcgaggccaagaccaccctgttctgcgcctccgacgccaagtcctacgagaaggaggtgcacaacatctgggccacccacgcctgcgtgcccaccgaccccaacccccaggagctggtgctgaagaacgtgaccgagaacttcaacatgtggaagaacgacatggtggaccagatgcacgaggacatcatctccctgtgggaccagtccctgaagccctgcgtgaagctgacccccctgtgcgtgaccctgcactgctccacctacaacaacacccacaacatctccaaggagatcaagaactgctccttcaacgccaccaccgagctgcgcgacaagcgccgcaaggagtacgccctgttctaccgcctggacatcgtgcccctgaacaagaacggccgccagtaccgcctgatcaactgcaacacctccgtgtgcacccaggtgtgccccaagctgaccttcgaccccatccccatccactactgcgcccccgccggctacgccatcctgaagtgcaacaacaagaccttcaacggcaccggcccctgcaacaacgtgtccaccgtgcagtgcacccacggcatcaagcccgtgctgtccacccagctgctgctgaacggctccctggccgaggaggagatcatcatccgctccgagaacctgaccgacaacgtgaagaccatcatcgtgcacctgaacgagtccgtggagatcaactgcacccgccccaacaacaacacccgcaagtccatccgcatcggccccggccagaccttctacgccaccggcgacatcatcggcgacatccgccaggcccactgcaacatctccgagatcaagtggaacaagaccctgcagcgcgtgtccgagaagctgcgcgagcacttcaacaagaccatcatcttcaaccagtcctccggcggcgacctggagatcaccacccactccttcaactgcggcggcgagttcttctactgcaacacctccgacctgttcttcaacaagaccttcaacgagacctactccaccggctccaactccaccaactccaacatcaccctgccctgccgcatcaagcagatcatcaacatgtggcaggaggtgggccgctgcatgtacgcctcccccatcgccggcgagatcacctgcaagtccaacatcaccggcctgctgctgacccgcgacggcggcggcaacaactccaccgaggagaccttccgccccggcggcggcaacatgcgcgacaactggcgctccgagctgtacaagtacaaggtggtggaggtgaagcccctgggcatcgcccccaccgagtgccgccgccgcgtggtgcagggcggcggcggctccggcggcggcggctccgccgtggtgggcctgggcgccgtgttcctgggcttcctgggcaccgccggctccaccatgggcgccgcctccatgaccctgaccgtgcaggcccgccagctgctgggctccgccggctccgccggctccggctccgccggctccggctccgccggctccggctccgccggctccaccgtgtggggcatcaagcagctgcaggcccgcgtgctggccatcgagcgctacctgaaggaccagcagctgctgggcatgtggggctgctccggcaagctgatctgctgcaccaacgtgtactggaactcctcctggtccaacaagacctacaacgagatctgggacaacatgacctggatgcagtgggaccgcgagatcgacaactacaccgacaccatctacaagctgctggaggtgtcccagaagcagcaggagtccaacgagaaggacctgctggccctggactcctggaacaacctgtggaactggttcgacatctccaagtggctgtggtacatcaagatcttcatcatgatcgtgggcggcctgatcggcctgcgcatcatcttcgccgtgctgtccctggtgaaccgcgtgcgccagggcatctcccccctgtccttccagaccctgacccccaacccccgcgagctggaccgcctgggcggcatcgaggaggagggcggcgagcaggaccgcgaccgctccatccgcctggtgtcctaataaactagtagtgactgactaggatctggttaccactaaaccagcctcaagaacacccgaatggagtctctaagctacataataccaacttacacttacaaaatgttgtcccccaaaatgtagccattcgtatctgctcctaataaaaagaaagtttcttcacattctaaaaaaaaaaaaaaaaaaaaaaaaaaaaaaaaaaaaaaaaaaaaaaaaaaaaaaaaaaaaaaaaaaaaaaaaaaaaaaaaaaaaaaaaaaaaaaaaaaaaa

SEQ ID NO: 443 - DNA, 2637 bp, synthetic construct
  source 1..2637: mol_type = other DNA
agcataaaagtctcaacacaacatatacaaaacaaacgaatctcaagcaatcaagcattctacttctattgcagcaatttaaatcatttcttttaaagcaaaagcaattttctgaaaattttcaccatttacgaacgatagcgctgccaccatggactccaagggctcctcccagaagggctcccgcctgctgctgctgctggtggtgtccaacctgctgctgccccagggcgtgctggccctgtgggtgaccgtgtactacggcgtgcccgtgtggcgcgaggccaagaccaccctgttctgcgcctccgacgccaagtcctacgagaaggaggtgcacaacatctgggccacccacgcctgcgtgcccaccgaccccaacccccaggagctggtgctgaagaacgtgaccgagaacttcaacatgtggaagaacgacatggtggaccagatgcacgaggacatcatctccctgtgggaccagtccctgaagccctgcgtgaagctgacccccctgtgcgtgaccctgcactgctccacctacaacaacacccacaacatctccaaggagatcaagaactgctccttcaacgccaccaccgagctgcgcgacaagcgccgcaaggagtacgccctgttctaccgcctggacatcgtgcccctgaacaagaacggccgccagtaccgcctgatcaactgcaacacctccgtgtgcacccaggtgtgccccaagctgaccttcgaccccatccccatccactactgcgcccccgccggctacgccatcctgaagtgcaacaacaagaccttcaacggcaccggcccctgcaacaacgtgtccaccgtgcagtgcacccacggcatcaagcccgtgctgtccacccagctgctgctgaacggctccctggccgaggaggagatcatcatccgctccgagaacctgaccgacaacgtgaagaccatcatcgtgcacctgaacgagtccgtggagatcaactgcacccgccccaacaacaacatgcgcaagtccatccgcatcggccccggccagaccttctacgccctgggcgacatcatcggcgacatccgccagccccactgcaacatctccgagatcaagtggaacaagaccctgcagcgcgtgtccgagaagctgcgcgagcacttcaacaagaccatcatcttcaaccagtcctccggcggcgacctggagatcaccacccactccttcaactgcggcggcgagttcttctactgcaacacctccgacctgttcttcaacaagaccttcaacgagacctactccaccggctccaactccaccaactccaacatcaccctgccctgccgcatcaagcagatcatcaacatgtggcaggaggtgggccgctgcatgtacgccccccccatcgccggcaacatcacctgcaagtccaacatcaccggcctgctgctgacccgcgacggcggcggcaacaactccaccgaggagaccttccgccccggcggcggcaacatgcgcgacaactggcgctccgagctgtacaagtacaaggtggtggaggtgaagcccctgggcatcgcccccaccgagtgccgccgccgcgtggtgcagggcggcggcggctccggcggcggcggctccgccgtggtgggcctgggcgccgtgttcctgggcttcctgggcaccgccggctccaccatgggcgccgcctccatgaccctgaccgtgcaggcccgccagctgctgggctccgccggctccgccggctccggctccgccggctccggctccgccggctccggctccgccggctccaccgtgtggggcttcaagcagctgcaggcccgcgtgctggccatcgagcgctacctggaggtgcagcagctgctgggcatgtggggctgctccggcaagctgatctgctgcaccaacgtgccctggaactcctcctggtccaacaagacctacaacgagatctgggacaacatgacctggatgcagtgggaccgcgagatcggcaactacaccgacaccatctacaagctgctggaggtgtcccagttccagcaggagatcaacgagaaggacctgctggccctggactcctggaacaacctgtggaactggttcgacatctccaagtggctgtggtacatcaagatcttcatcatgatcgtgggcggcctgatcggcctgcgcatcatcttcgccgtgctgtccctggtgaaccgcgtgcgccagggcatctcccccctgtccttccagaccctgacccccaacccccgcgagctggaccgcctgggcggcatcgaggaggagggcggcgagcaggaccgcgaccgctccatccgcctggtgtcctaataaactagtagtgactgactaggatctggttaccactaaaccagcctcaagaacacccgaatggagtctctaagctacataataccaacttacacttacaaaatgttgtcccccaaaatgtagccattcgtatctgctcctaataaaaagaaagtttcttcacattctaaaaaaaaaaaaaaaaaaaaaaaaaaaaaaaaaaaaaaaaaaaaaaaaaaaaaaaaaaaaaaaaaaaaaaaaaaaaaaaaaaaaaaaaaaaaaaaaaaaaa

SEQ ID NO: 444 - DNA, 2637 bp, synthetic construct
  source 1..2637: mol_type = other DNA
agcataaaagtctcaacacaacatatacaaaacaaacgaatctcaagcaatcaagcattctacttctattgcagcaatttaaatcatttcttttaaagcaaaagcaattttctgaaaattttcaccatttacgaacgatagcgctgccaccatggactccaagggctcctcccagaagggctcccgcctgctgctgctgctggtggtgtccaacctgctgctgccccagggcgtgctggccctgtgggtgaccgtgtactacggcgtgcccgtgtggcgcgaggccaagaccaccctgttctgcgcctccgacgccaagtcctacgagaaggaggtggccaacatctgggccacccacgcctgcgtgcccaccgaccccaacccccaggagctggtgctgaagaacgtgaccgagaacttcaacatgtggaagaacgacatggtggaccagatgcacgaggacatcatctccctgtgggaccagtccctgaagccctgcgtgaagctgacccccctgtgcgtgaccctgcactgctccacctacaacaacacccacaacatctccaaggagatcaagaactgctccttcaacgccaccaccgagctgcgcgacaagcgccgcaaggagtacgccctgttctaccgcctggacatcgtgcccctgaacaagaacggccgccagtaccgcctgatcaactgcaacacctccgtgtgcacccaggtgtgccccaagctgaccttcgaccccatccccatccactactgcgcccccgccggctacgccatcctgaagtgcaacaacaagaccttcaacggcaccggcccctgcaacaacgtgtccaccgtgcagtgcacccacggcatcaagcccgtgctgtccacccagctgctgctgaacggctccctggccgaggaggagatcatcatccgctccgagaacctgaccgacaacgtgaagaccatcatcgtgcacctgaacgagtccgtggagatcaactgcacccgccccaacaacaacacccgcaagtccatccgcatcggccccggccagtggttctacgccaccggcgacatcatcggcgacatccgccaggcccactgcaacatctccgagatcaagtggaacaagaccctgcagcgcgtgtccgagaagctgcgcgagcacttcaacaagaccatcatcttcaaccagtcctccggcggcgacctggagatcaccacccactccttcaactgcggcggcgagttcttctactgcaacacctccgacctgttcttcaacaagaccttcaacgagacctactccaccggctccaactccaccaactccaacatcaccctgccctgccgcatcaagcagatcatcaacatgtggcaggaggtgggccgctgcatgtacgcctcccccatcgccggcgagatcacctgcaagtccaacatcaccggcctgctgctgacccgcgacggcggcggcaacaactccaccgaggagaccttccgccccggcggcggcaacatgcgcgacaactggcgctccgagctgtacaagtacaaggtggtggaggtgaagcccctgggcatcgcccccaccgagtgccgccgccgcgtggtgcagggcggcggcggctccggcggcggcggctccgccgtggtgggcctgggcgccgtgttcctgggcttcctgggcaccgccggctccaccatgggcgccgcctccatgaccctgaccgtgcaggcccgccagctgctgggctccgccggctccgccggctccggctccgccggctccggctccgccggctccggctccgccggctccaccgtgtggggcatcaagcagctgcaggcccgcgtgctggccatcgagcgctacctgaaggaccagcagctgctgggcatgtggggctgctccggcaagctgatctgctgcaccaacgtgtactggaactcctcctggtccaacaagacctacaacgagatctgggacaacatgacctggatgcagtgggaccgcgagatcgacaactacaccgacaccatctacaagctgctggaggtgtcccagaagcagcaggagaagaacgagcaggacctgctggccctggactcctggaacaacctgtggaactggttcgacatctccaagtggctgtggtacatcaagatcttcatcatgatcgtgggcggcctgatcggcctgcgcatcatcttcgccgtgctgtccctggtgaaccgcgtgcgccagggcatctcccccctgtccttccagaccctgacccccaacccccgcgagctggaccgcctgggcggcatcgaggaggagggcggcgagcaggaccgcgaccgctccatccgcctggtgtcctaataaactagtagtgactgactaggatctggttaccactaaaccagcctcaagaacacccgaatggagtctctaagctacataataccaacttacacttacaaaatgttgtcccccaaaatgtagccattcgtatctgctcctaataaaaagaaagtttcttcacattctaaaaaaaaaaaaaaaaaaaaaaaaaaaaaaaaaaaaaaaaaaaaaaaaaaaaaaaaaaaaaaaaaaaaaaaaaaaaaaaaaaaaaaaaaaaaaaaaaaaaa

SEQ ID NO: 445 - protein, 6 aa, synthetic construct
RRRRRR

SEQ ID NO: 446 - protein, 20 aa, synthetic construct
KINEGNSSNSNTSMYRLINC

SEQ ID NO: 447 - protein, 18 aa, synthetic construct
EINEGNSSNSSMYRLINC

1. A recombinant HIV-1 envelope polypeptide from Table 2, FIG. 4C, FIG. 12F, FIG. 13, or Table 3, FIG. 14, FIG. 15, FIG. 16, FIG. 17, or FIG. 18F, or Table 4 or encoded by a nucleic acid according to FIG. 19.

2. The recombinant HIV-1 envelope of claim 1, wherein the polypeptide is a non-naturally occurring protomer designed to form an envelope trimer.

3. A nucleic acid encoding the recombinant HIV-1 envelope polypeptide of claim 1.

4. A recombinant trimer comprising three identical protomers of an envelope from Table 2, FIG. 4C, FIG. 12F, FIG. 13, Table 3, FIG. 14, FIG. 15, FIG. 16, FIG. 17, or FIG. 18F, or Table 4 or encoded by a nucleic acid according to FIG. 19.

5. An immunogenic composition comprising the recombinant trimer of claim 4 and a carrier.

6. An immunogenic composition comprising the nucleic acid of claim 3 and a carrier.

7. The immunogenic composition of claim 5 er 6 further comprising an adjuvant.

8. The nucleic acid of claim 3, wherein the nucleic acid is operably linked to a promoter, and optionally wherein the nucleic acid is inserted in an expression vector.

9. A method of inducing an immune response in a subject comprising administering a composition comprising any suitable form of the polypeptide of claim 1 or a nucleic acid encoding the polypeptide in an amount sufficient to induce an immune response.

10. The method of claim 9 wherein the nucleic acid encodes a gp120 envelope, gp120D8 envelope, a gp140 envelope (gp140C, gp140CF, gp140CFI) as soluble or stabilized protomer of a SOSIP trimer, a gp145 envelope, a gp150 envelope, a transmembrane bound envelope, a gp160 envelope or an envelope designed to multimerize.

11. The method of claim 9 wherein the polypeptide is gp120 envelope, gp120D8 envelope, a gp140 envelope (gp140C, gp140CF, gp140CFI) as soluble or stabilized protomer of a SOSIP trimer, a gp145 envelope, a gp150 envelope, a transmembrane bound envelope, or an envelope designed to multimerize.

12. The method of claim 9, wherein the composition further comprises an adjuvant.

13. The method of claim 9, further comprising administering an agent which modulates host immune tolerance.

14. The method of claim 11, wherein the polypeptide administered is multimerized in a liposome or nanoparticle.

15. The method of claim 10, wherein the nucleic acid administered is a mRNA.

16. The method of claim 10, wherein the nucleic acid is encapsulated in a lipid nanoparticle.

17. (canceled)

18. A composition comprising a nanoparticle and a carrier, wherein the nanoparticle comprises any one of the envelopes of claim 1.

19. (canceled)

20. A composition comprising a nanoparticle and a carrier, wherein the nanoparticle comprises any one of the trimers of claim 2.

21-23. (canceled)

24. A composition comprising a nanoparticle and carrier, wherein the nanoparticle comprises any one of the nucleic acids of claim 3.

25. The composition of claim 24, wherein the nucleic acid is a mRNA.

26-52. (canceled)
